(19) United States
(12) Patent Application Publication
(10) Pub. No.: US 2024/0180975 A1
(43) Pub. Date: Jun. 6, 2024

(54) BACTERIAL STRAINS FOR USE AS PROBIOTICS, COMPOSITIONS THEREOF, DEPOSITED STRAINS AND METHOD TO IDENTIFY PROBIOTIC BACTERIAL STRAINS

(71) Applicant: INSTITUT PASTEUR, PARIS CEDEX 15 (FR)

(72) Inventors: JEAN-MARC GHIGO, FONTENAY AUX ROSES (FR); DAVID PEREZ-PASCUAL, JOUY EN JOSAS (FR); FRANZISKA STRESSMANN, BERLIN (DE); JOAQUIN BERNAL-BAYARD, Seville (ES)

(21) Appl. No.: 17/996,127

(22) PCT Filed: Apr. 15, 2021
(86) PCT No.: PCT/IB2021/000280

§ 371 Date: Oct. 13, 2022

(30) Foreign Application Priority Data
Apr. 15, 2020 (EP) 20169704.2

(51) Int. Cl. A61K 35/741; A23K 10/18; A23K 50/80; C12N 1/20; C12R 1/01; C12R 1/20

(52) U.S. Cl. CPC A61K 35/741; A23K 10/18; A23K 50/80; C12N 1/205; C12R 2001/01; C12R 2001/20

(57) ABSTRACT

The invention relates to a bacterial strain or a combination of bacterial strains, selected from the group consisting of: a Chryseobacterium massiliae strain, a Flavobacterium sp. strain with at least 95% or more Average Nucleotide Identity (ANI) value with the Flavobacterium sp. strain whose genome comprises SEQ ID NO: 1 or as identified by Accession Number No. I-5481 deposited at the Collection Nationale De Culture De Microorganismes (CNCM) on Jan. 24, 2020, and variants thereof, for use as a probiotic in fish(es). The bacterial strain(s) may has(ve) at least 95% or more Average Nucleotide Identity (ANI) value with the Chryseobacterium massiliae strain whose genome comprises SEQ ID NO:2 or as identified by Accession Number No. I-5479 deposited at the CNCM on Jan. 24, 2020, and/or the Flavobacterium sp. strain whose genome comprises SEQ ID NO: 1 or as identified by Accession Number No. I-5481 deposited at the CNCM on Jan. 24, 2020, respectively, or variants thereof. Probiotic use may be directed to preventing or minimizing infections by Flavobacterium columnare in fishes. The invention also concerns the said deposited bacterial strains, or probiotic compositions or food products or kits comprising the same, and a method to identify bacterial strain(s) that are probiotic against a pathogen infection.

### FIELD OF THE INVENTION

[0001] The invention relates to the field of probiotics, especially under the form of bacterial strains as active ingredients for use as probiotics or suitable for the design of probiotic compositions for administration to fishes. The invention thus involves using such active ingredients for treatment of said fishes, for preventive and/or beneficial effect on their health. The active ingredients of the present invention have in particular been shown to be beneficial against infection challenge by Flavobacterium columnare bacterium. The invention also relates to a method to identify probiotic bacterial strains.

### BACKGROUND OF THE INVENTION

[0002] Animal resident microbial consortia form complex and long-term associations playing important community-level functions essential for host development and physiology [1,2]. Microbiota ecosystems also provide protection against exogenous pathogens by a combination of inhibition of pathogen settlement and growth and/or stimulation of the host immune system [3-7]. From the perspective of microbial community composition, a shift or reduction in resident microbial diversity, a phenomenon generally referred to as dysbiosis, is often associated with increased susceptibility to infection due to the loss or change in abundance of key microbial community members [7, 8]. These observations early supported the notion that addition or promotion of individually or communally protective bacteria (such as probiotics) could minimize microbiota dysbiosis or directly prevent infection to restore host health [9-11].

[0003] Although the efficacy of probiotics have been shown in animal and humans, their mechanisms of action are poorly understood and diversity surveys or low throughput experimental models offer limited information on the contribution of species to community functions [1, 6, 12-14]. Moreover, characterization of bacterial strains improving colonization resistance is still hindered by the complexity of host-commensal ecosystems. Zebrafish have recently emerged as a powerful tool to study microbe-microbe and host-microbe interactions [15-20]. Zebrafish can be easily reared germ-free or gnotobiotically in association with specific bacterial species [15,21]. Moreover, zebrafish bacterial communities are increasingly well characterized and a number of phylogenetically distinct zebrafish gut bacteria can be cultured, making this model system directly amenable to microbiota manipulation and assessment of probiotic effect on host infection resistance [22-25]. Several studies have used zebrafish to evaluate the effect of exogenous addition of potential probiotics on host resistance to infection [23-25]. However, whereas various lactic acid bacteria (Lactobacilli spp., Bacillus spp.) were shown to improve the outcome of infection against a number of zebrafish pathogens (e.g. Aeromonas hydrophila, A. veronii, Streptococcus agalactiae and Vibrio parahaemolyticus) [26-30], the reported protections were often partial, illustrating the difficulty in identifying fully protective exogenous probiotics.

[0004] The inventors used germ-free and conventional zebrafish larvae to mine the indigenous commensal microbiota for bacterial species protecting against Flavobacterium columnare, a bacteroidetes pathogenic bacterium affecting wild and cultured fish species, including carp, channel catfish, goldfish, eel, salmonids and tilapia [31, 32]. They identified two infection resistance scenarios preventing mortality caused by F. columnare, mediated either by the bacteroidetes bacterium Chryseobacterium massiliae or by an assembly of 9 otherwise non-protecting bacterial species that formed a protective community. Their results constitute a powerful approach to mine host microbiota and identify key members mediating colonization resistance, providing insight into how to engineering microbial communities to protect against pathogens in aquaculture settings and beyond.

[0005] Actually, while wild fish stocks are approaching biologically unsustainable limits, fish aquaculture is a fast-growing industry providing over half of all consumed fish [101]. However, intensive aquaculture promotes pathogens outbreaks and the high mortality rate in aquaculture facilities constitutes an important bottleneck for fish production [102-104]. These health issues primarily affect immunologically immature young fish larvae, in which vaccination is unpractical [105, 106], prompting the prophylactic and therapeutic use of antibiotics and chemical disinfectants to prevent fish diseases [107-109]. However, the widespread use of antibiotics and chemical disinfectants are associated with final consumer safety risks, environmental pollution and spread of antibiotic resistance resulting in broad human health concerns [104, 110]. In this context, use of probiotic to improve fish health and protect disease-susceptible juveniles appears as an economically and ecologically sensible alternative strategy to antibiotics treatments [111-113].

[0006] Probiotics are live microorganisms conferring health benefit on the host via mechanisms, including promotion of growth, immunostimulation or direct inhibition of pathogenic microorganisms [114-116]. Considering the important protective role played by host microbiota against pathogenic microorganism, a process known as colonization resistance [117-119], the fish-associated microbial community is considered an interesting source of probiotic bacteria [120-122]. Indeed, gastrointestinal tract and fish mucus are the most common sources of potential fish probiotics [123, 124]. However, selection of probiotic bacteria, is often empirical or hampered by the lack of repeatability and reproducibility of in vivo challenges, often performed in relatively poorly controlled conditions and high inter-individual microbial composition [121, 125].

[0007] To circumvent the experimental difficulties associated with evidence-based identification of fish probiotics, use of the germ-free or fully controlled gnotobiotic host is a promising strategy [126, 127] and several economically important fish species have been successfully reared under sterile conditions, including the Atlantic cod (Gadus morhua L.) [128]. Atlantic halibut (Hippoglossus hippoglossus) [129], European sea bass (Dicentrarchus labrax) or turbot (Scophthalmus maximus) (for review, see [131, 132]). Other studies used germ free or gnotobiotically reared laboratory zebrafish (Danio rerio) to evaluate the effect of addition of exogenous probiotic on host infection [133-136]. In most cases, however, the tested probiotics were exogenous to the host and short-term microbiota residents, only providing partial protection against the tested pathogens.

[0008] The inventors thus studied the potential of members of the rainbow trout (Oncorhynchus mykiss) microbiota to protect against infection by Flavobacterium columnare, a fish pathogen causing major losses in aquaculture fish species, especially catfish and salmonids [137]. Using a new protocol to rear trout larvae in sterile conditions, they showed that germ-free but not conventional trout larvae were extremely sensitive to infection by F. columnare. They then used reconventionalization of germ-free trout to identify bacterial species originating from trout (Flavobacterium sp.) or zebrafish (Chryseobacterioum massiliae) microbiota that fully restored protection against F. columnare infection. Their results show that their new gnotobiotic trout model enables mining of teleostean fish microbiota to rationally identify fish probiotics that could, alone or in combination contribute to protect against columnaris disease in rainbow trout and other fish in the context of aquaculture research and husbandry.

[0009] The invention therefore relies on the experiments described herein, and proposes new means and tools for addressing the above-mentioned problems. In particular, the invention relates to the provision of relevant probiotic material for protection of fishes, against pathogens and their deleterious effects.

### DETAILED DESCRIPTION OF THE INVENTION

[0010] The invention therefore relates to a bacterial strain or combination of bacterial strains, wherein the bacterial strain or at least one bacterial strain of the combination is selected from the group consisting of: a Chryseobacterium massiliae strain, a Chryseobacterium massiliae strain wherein one or more virulence factor coding gene(s) and/or antibiotic resistance gene(s) is(are) deleted or inactivated, a Flavobacterium sp. strain whose genome has at least 95% or more Average Nucleotide Identity (ANI) with SEQ ID NO:1 or which has at least 95% ANI with the Flavobacterium sp. strain identified by Accession Number No. I-5481 deposited at the CNCM on Jan. 24, 2020, and a Flavobacterium sp. strain whose genome has at least 95% or more Average Nucleotide Identity (ANI) with SEQ ID NO:1 or which has at least 95% ANI with the Flavobacterium sp. strain identified by Accession Number No. I-5481 deposited at the CNCM on Jan. 24, 2020 wherein one or more virulence factor coding gene(s) and/or antibiotic resistance genes is(are) deleted or inactivated, for use as a probiotic in a fish or population(s) of fishes.

[0011] The address of CNCM is: Collection Nationale de Culture de Microorganismes, Institut Pasteur, 28 rue du Dr Roux, 75724 Paris CEDEX 15, France.

[0012] SEQ ID NO:1 is the whole genome sequence of a particular Flavobacterium. sp. strain described herein, sequenced according to the experiments described herein and also available in ENA (European Nucleotide Archive) database under primary accession number ERS4574862 (version 1) and secondary accession number SAMEA6847264 (Tax ID 2730889, scientific name Flavobacterium sp. UGB 4466).

[0013] The 16S rRNA gene sequence of the particular Flavobacterium. sp. strain of SEQ ID NO: 1 is disclosed herein under SEQ ID NO: 3.

[0014] The expressions “16S rRNA” and “16S rDNA” are used interchangeably herein,

[0015] It will be understood that references to either “fish” (singular) or “fishes” (plural) in the present text, the latter generally referring to populations of fishes, are meant to be interchangeable throughout the present description, unless the context or general sense dictate otherwise.

[0016] Average Nucleotide Identity (ANI) value can be readily determined by the skilled person using common knowledge and available tools, which are well detailed in the literature. The ANI between two genomes, especially prokaryotic genomes, is commonly known as a taxonomic method for classification that emerged in the era of genomics. Before that, DNA-DNA hybridization (DDH) has been used for nearly 50 years as a standard for prokaryotic species circumscriptions at the genomic level. Other methods are available as well, some of which are also detailed in the present application, including in the Experimental Section, such as 16S rRNA gene sequence similarity, the recA gene sequence similarity or the rplC gene sequence similarity. Present description also provides bibliographic references regarding implementation of the 16S rRNA gene sequence similarity method, in addition to the guidance provided herein, which can be used as guidelines by the skilled person.

[0017] Software tools for carrying out the Average Nucleotide Identity (ANI) method and calculating an ANI value are also readily accessible to the skilled person: they can in particular be freely accessible over the internet. An example can be found at https://www.ezbiocloud.net/tools/ani. The literature provides details regarding available tools. In particular, identity percentages can conventionally be calculated through local, preferably global, sequence alignment algorithms and their available computerized implementations. In a most preferred embodiment, identity percentages are calculated over the entire length of the compared sequences, which may be the entire genomes of the compared strains. Global alignments, which attempt to align every residue in every sequence, are most useful when the sequences in the query set are similar and of roughly equal size. Computerized implementations of the algorithms used are generally associated with default parameters in the literature, which can be used for running said algorithm. The skilled person can readily adapt the same taking into account its objective or the sequences comparison made.

[0018] Whatever the algorithm used, it is however admitted that an ANI value of 95% is an appropriate cutoff value for distinguishing between two species, i.e., for classifying the genome of the strain whose classification is sought, within an existing species (as annotated in databases) or to define a new, unknown to date, species.

[0019] The identification of the specific bacterial strains of the present invention, as described herein, was carried out by whole genome-based identification, and was performed by the TrueBac ID system (v1.92, DB:20190603) [https://www.truebacid.com/; [66]. The main section of the TrueBac ID-Genome system consists of (1) a proprietary reference database, named the TrueBac database, which is curated to hold up-to-date nomenclature, 16S rRNA gene, and genome sequences of type/reference strains, and (2) the optimized bioinformatics pipeline that provides the identification of a query genome sequence using the average nucleotide identity (ANI). The algorithmic identification scheme using WGS works as follow: first, the most phylogenetically closely related pool of taxa was identified using a search of three genes—16S rRNA, recA, and rplC—which were extracted from the whole genome assembly. Then, to the gene-based searches, the Mash tool (https://github.com/marbl/mash) is used for additional fast whole-genome based searches. The top-hits of the above four searches are then pooled, and the ANI was calculated using the MUMmer tool. Species-level identification was performed based on the algorithmic cut-off set at 95% ANI when possible or when the 16S rDNA gene sequence similarity was >99% (for identifying the species with accuracy, resulting, in turn, in the identification of a novel species of Flavobacterium strain).

[0020] The skilled person can therefore readily determine the ANI value using the MUMmer tool described above and herein.

[0021] According to a particular embodiment, a Chryseobacterium massiliae strain as described herein or of use within the present invention has, alternatively or in addition of any other feature as described herein, a genome that has at least 95% or more, preferably 96% or more, Average Nucleotide Identity (ANI) value with SEQ ID NO: 2.

[0022] SEQ ID NO:2 is the whole genome sequence of a particular Chryseobacterium massiliae strain described herein, sequenced according to the experiments described herein and also available in ENA (European Nucleotide Archive) database under primary accession number ERS4385998 (version 1) and secondary accession number SAMEA6623857 (Tax ID 204089, scientific name Candidatus Chryseobacterium massiliae).

[0023] In a particular embodiment, the strain is a variant of the above mentioned strain, in which one or more virulence factor coding gene(s) and/or antibiotic resistance genes is(are) deleted or inactivated.

[0024] The 16S rRNA gene sequence of the particular Chryseobacterium massiliae strain of SEQ ID NO: 2 is disclosed herein under SEQ ID NO: 4.

[0025] The closest hit taxons of the particular strains as described herein are provided in the tables below, for the particular Flavobacterium. Sp and the Chryseobacterium massiliae strains described herein, respectively.

| No. | Hit taxon | ANI (%) | ANI coverage (%) | 16S (%) | recA (%) | rpIC (%) |
|---|---|---|---|---|---|---|
| 1 | Flavobacterium | 94.65 | 82.4 | 97.80 | 98.51 | 99.52 |
| | spartansii | | | | | |
| 2 | Flavobacterium | 94.62 | 83.9 | 97.80 | 98.11 | 99.68 |
| | tructae | | | | | |
| 3 | Flavobacterium | 85.26 | 39.8 | 97.27 | 89.48 | N/A |
| | chilense | | | | | |

[0026] It can thus be seen that the Flavobacterium. Sp bacterial strain of the invention (also termed Flavobacterium. Sp 4466 herein) has 94.65% Average Nucleotide Identity (ANI) with the Flavobacterium spartansii ATCC BAA-2541 strain, whose sequence is available in the GenBank database under accession number MUHG01000041.1 (version 1) -https://www.ncbi.nlm.nih.gov/nuccore/MUHG01000041.1. The strain whose sequence is disclosed in SEQ ID NO: 1 accordingly constitutes a novel Flavobacterium species, never described so far.

[0027] Accordingly, in particular embodiments the present invention concerns or makes use of Flavobacterium. sp. strains with at least 95% or more Average Nucleotide Identity (ANI) value with the Flavobacterium spartansii ATCC BAA-2541 bacterial strain taken as a reference sequence. Such strains may be used, as described herein, as a probiotic in a fish or population(s) of fishes.

[0028] The particular Flavobacterium. Sp bacterial strain described herein also has 97.80% 16S rRNA gene sequence similarity with the Flavobacterium spartansii ATCC BAA-2541 bacterial strain.

[0029] The 16S rRNA gene sequence of Flavobacterium spartansii ATCC BAA-2541 bacterial strain is disclosed herein under SEQ ID NO: 5.

[0030] Accordingly, in particular embodiments the present invention concerns or makes use of Flavobacterium. sp. strains whose genome comprises a 16s rDNA sequence with at least 98% sequence identity to SEQ ID NO: 5 taken as a reference sequence.

[0031] According to a particular embodiment, the present invention concerns or makes use of Flavobacterium. sp. strains whose genome have at least 95% or more Average Nucleotide Identity (ANI) value with the Flavobacterium spartansii ATCC BAA-2541 bacterial strain taken as a reference sequence and comprising a 16s rDNA sequence with at least 98% sequence identity to SEQ ID NO: 5 taken as a reference sequence.

[0032] In a particular embodiment, the strain is a variant of any one of the above mentioned strain, in which one or more virulence factor coding gene(s) and/or antibiotic resistance genes is(are) deleted or inactivated.

[0033] In a particular embodiment, a Flavobacterium. sp. strain of the invention or as described in any embodiment herein keeps the properties, in particular the biological properties as described herein, of the Flavobacterium sp. strain identified by Accession Number No. I-5481 deposited at the Collection Nationale de Culture de Microorganismes (CNCM) on Jan. 24, 2020, and/or keeps the the properties, in particular the biological properties as described herein, of the Flavobacterium sp. strain of SEQ ID NO:1. Probiotic properties are particularly referred to.

| No. | Hit taxon | ANI (%) | ANI coverage (%) | 16S (%) | recA (%) | rpIC (%) |
|---|---|---|---|---|---|---|
| 1 | Chryseobacterium | 95.85 | 83.1 | 99.86 | 96.61 | 99.84 |
| | massiliae | | | | | |
| 2 | Chryseobacterium | 83.81 | 21 | 97.95 | N/A | N/A |
| | defluvii | | | | | |
| 3 | Chryseobacterium | 84.30 | 4.1 | 97.67 | N/A | N/A |
| | zeae | | | | | |

[0034] It can thus be seen that the Chryseobacterium massiliae bacterial strain of the invention has 95.85% Average Nucleotide Identity (ANI) with the Chryseobacterium massiliae CCUG 51329 strain, whose sequence is available in the GenBank database under accession number ASM338553 (version 1)—https://www.ncbi.nlm.nih.gov/assembly/GCF_003385535.1/.

[0035] Accordingly, in particular embodiments the present invention concerns or makes use of Chryseobacterium massiliae strains whose genome have at least 96% or more Average Nucleotide Identity (ANI) value with the Chryseobacterium massiliae CCUG 51329 bacterial strain taken as a reference sequence. Such strains may be used, as described herein, as a probiotic in a fish or population(s) of fishes.

[0036] The Chryseobacterium massiliae bacterial strain described herein also has 99.86% 16S rRNA gene sequence similarity with the Chryseobacterium massiliae CCUG 51329 bacterial strain.

[0037] The 16S rRNA gene sequence of Chryseobacterium massiliae CCUG 51329 bacterial strain is disclosed herein under SEQ ID NO:6.

[0038] According to a particular embodiment, the present invention concerns or makes use of Chryseobacterium massiliae strains with at least 96% or more Average Nucleotide Identity (ANI) value with the Chryseobacterium massiliae CCUG 51329 bacterial strain taken as a reference sequence and comprising a 16s rDNA sequence with at least 99.9% sequence identity to SEQ ID NO: 6 taken as a reference sequence.

[0039] Alternatively, the present invention concerns or makes use of Chryseobacterium massiliae strains whose genomes have at least 97% or more Average Nucleotide Identity (ANI) value with the Chryseobacterium massiliae CCUG 51329 bacterial strain taken as a reference sequence.

[0040] In a particular embodiment, the strain is a variant of any one of the above mentioned strain, in which one or more virulence factor coding gene(s) and/or antibiotic resistance genes is(are) deleted or inactivated.

[0041] In a particular embodiment, a Chryseobacterium massiliae strain of the invention or as described in any embodiment herein, including variants, keeps the properties, in particular the biological properties as described herein, of the Chryseobacterium massiliae strain identified by Accession Number No. I-5479 deposited at the Collection Nationale de Culture de Microorganismes (CNCM) on Jan. 24, 2020, and/or keeps the properties, in particular the biological properties as described herein, of the Chryseobacterium massiliae strain of SEQ ID NO:2. Probiotic properties are particularly referred to.

[0042] According to a particular embodiment, the ANI value of a Flavobacterium. sp. strain of use within instant invention, with the Flavobacterium sp. strain identified by Accession Number No. I-5481 deposited at the Collection Nationale De Culture De Microorganismes (CNCM) on Jan. 24, 2020, is either as disclosed in any embodiment herein, and/or can reach 96% or more, 97% or more, 98% or more, 99% or more, or be 100%.

[0043] Other methods than the ANI value for defining Flavobacterium. sp encompassed by instant invention are detailed herein. The skilled person will appreciate that all these methods can readily define appropriate subsets of Flavobacterium. sp strains in the context of instant invention. Table 1 below show examples of correlating data in the course of verification of the taxonomic identities of prokaryotic genomes, although classification methods are different.

[0044] As defined herein, the strains of use within instant invention may be defined through a series of parameters, e.g., an ANI value of 95% or more and a so-called “16S” value of 97%, 98% or 99% or more. These combinations are encompassed herein by the use of the wording “and/or” for combining parameters, according to all values and embodiments described herein.

[0045] According to a particular embodiment, a Chryseobacterium massiliae strain of use within instant invention, is a Chryseobacterium massiliae strain with at least 95% or more Average Nucleotide Identity (ANI) value with the Chryseobacterium massiliae strain identified by Accession Number No. I-5479 deposited at the Collection Nationale De Culture De Microorganismes (CNCM) on Jan. 24, 2020, and/or a Chryseobacterium massiliae with at least 95% or more, preferably 96% or more, Average Nucleotide Identity (ANI) value with SEQ ID NO:2.

[0046] When reference is made to the fact that one or more virulence factor coding gene(s) or antibiotic resistance gene(s) is(are) deleted or inactivated in the considered strain, which is a feature that can be associated to any embodiment described herein, it is observed that the skilled person in the art can readily select the one or more genes which are deleted or inactivated, and if required engineer the resulting strain, following guidance as presented herein and his general knowledge regarding bacterial strain attenuation or inactivation of resistance gene(s).

[0047] According to an embodiment, a bacterial strain of the invention, according to any embodiment described herein, is avirulent to a healthy fish. The said bacterial strain can be naturally avirulent, or it can be avirulent by genetic and/or chemical attenuation.

[0048] Methods for attenuation of pathogenic bacteria are known in the art. Genetic attenuation can be achieved by inactivating one or more gene(s) involved in metabolic pathway(s) of the bacteria, more particularly in one or more pathogenic mechanism(s) of the bacteria, and/or by inactivating one or more gene(s) involved in or responsible for the production of virulence factor(s) of the bacteria.

[0049] According to an embodiment, the bacterial strain is attenuated by partial or complete deletion of one or more gene(s), still more particularly by partial or complete deletion of one or more genes involved in or responsible for the production of virulence factor(s) of said bacterial strain. Such genes may be as listed in Tables 7 and 8 of present description (see Results section), for each respectively considered strain.

[0050] More precisely, the isolated strain Chryseobacterium sp. has been shown to contain five predicted virulence factors, including some proteins involved in capsule biosynthesis, heat shock protein HtpB subunit, KatA catalase and ClpP protease proteolytic subunit. According to a particular embodiment, the Chryseobacterium sp. of the invention has one or several genes amongst those it contains (as it can be determined following the guidance and tools provided and described in the results and methods sections herein), especially those having the above referred involvements, which are partially or fully deleted.

[0051] The Flavobacterium sp. 4466 has been shown to contain genes encoding for capsule, sialic acid synthase, type IV and type VI secretion systems effectors and catalase as potential virulence factors. According to a particular embodiment, the Flavobacterium sp. 4466 strain of the invention has one or several genes amongst those it contains (as it can be determined following the guidance and tools provided and described in the results and methods sections herein), especially those having the above referred involvements, which are partially or fully deleted.

[0052] For all these embodiments, exemplary representative genes are provided in Table 6, the content of which is referred to herein: any one or several of the genes precisely cited in this Table can be found deleted or partially deleted in a variant strain of the invention.

[0053] The same applies to antibiotic resistance genes. According to an embodiment, which can be cumulative to the other embodiments described in present application, the bacterial strain is engineered by partial or complete deletion of one or more genes, still more particularly by partial or complete deletion of one or more genes involved in antibiotic resistance of said bacterial strain. Such genes may be as listed in Table 6 of present description (see Results section), for each respectively considered strain.

[0054] The Flavobacterium sp. 4466 has been shown to contain genes encoding resistance to carbapenem, lincosamide, streptogramin, pleuromutilin, and fluoroquinolone antibiotics. According to a particular embodiment, the Flavobacterium sp. 4466 strain of the invention has one or several genes amongst those it contains (as it can be determined following the guidance and tools provided and described in the results and methods sections herein), especially those having the above referred involvements, which are partially or fully deleted.

[0055] In all matters, partial deletion is achieved to an extent sufficient to inactivate the function of the gene.

[0056] For ease of writing in the presence description, bacterial strains with one or more virulence factor coding gene(s) or antibiotic resistance genes is(are) deleted or inactivated can also be termed “variants” herein. Variants of the invention however keep the functional properties of their parents strains. In particular they keep their probiotic effect.

[0057] Unless the context or general sense dictate otherwise, when reference to bacterial strain(s) is made in present description, variants thereof as defined above, are systematically encompassed in the definition of said bacterial strain or combination or association of strains (where the variant of one strain can be found associated either with other non variant strain(s), or with other variant strain(s), according to all possible combinations thereof).

[0058] According to a particular embodiment, applicable throughout the description, the bacterial strain or bacterial strains (and variants thereof) is(are) associated with acceptable carrier or delivery vehicle(s) and optionally adjuvant component(s), within a single composition or separate compositions comprising or consisting essentially of, or consisting of, a mixture of distinct bacterial strains. According to a particular embodiment, applicable throughout the description, the bacterial strain or bacterial strains of interest within the present invention is(are) used for the purpose described herein, or in the compositions described herein, to the proviso that they keep it/their probiotic properties, especially vis à vis/against any application described herein, in particular against infections by pathogen(s) and their outcomes as described herein, in particular when the Flavobacterium columnare bacteria is considered, and/or vis à vis/against a fish or a population of fishes to be treated as described in any embodiment of the present description.

[0059] According to a particular embodiment, when only one bacterial strain is used, said bacterial strain is administered to a host in need thereof either without acceptable carrier or delivery vehicle(s) (or adjuvant component(s) when relevant), or within a composition as defined above and according to any embodiment described in the present description.

[0060] According to a particular embodiment, when a combination of distinct bacterial strains is used, said bacterial strains are administered to a host in need thereof:
[0061] i. as separate bacterial strains without acceptable carrier or delivery vehicle(s) (or adjuvant component(s) when relevant), or
[0062] ii. as a mixture of distinct bacterial strains found within a single composition, or
[0063] iii. within distinct compositions each comprising, or consisting essentially of, or consisting of, at least one bacterial strain, or
[0064] iv. as a collocation of at least one individualized (singled out) bacterial strain and distinct composition(s) each comprising, or consisting essentially of, or consisting of, at least one bacterial strain.

[0065] By “individualized”, or alternatively “singled out” bacterial strain, it is meant a bacterial strain without acceptable carrier or delivery vehicle(s) (or adjuvant component(s) when relevant.

[0066] The skilled person can readily understand that bacterial strain(s) of the invention, with desirable protective properties as described herein, may be directly put into contact with the fish or population of fishes to serve as a probiotic. For instance, the bacterial strain(s) of the invention may be directly added into the raising water of said fish.

[0067] Pharmaceutical products can also be devised. Examples of pharmaceuticals for the delivery of probiotics are: capsules, liquids, powder beads, tablets . . . . In a particular embodiment, bacterial strain(s) of the invention is(are) administered in a liquid formulation. In a particular embodiment, bacterial strain(s) of the invention is(are) administered in a powder formulation.

[0068] Alternatively, bacterial strain(s) of the invention may be conveniently, as known in the field, be provided to the fish(es) so as to achieve its probiotic effect, along with meals, or when contained within food products: bacterial strain(s) of the invention may be provided to fishes along with fish meals (i.e., in association with: provided at the same time but not mixed with the fish meal before the fishes are fed), or contained within fish food products. In a particular embodiment, bacterial strain(s) of the invention is(are) encapsulated.

[0069] In a particular embodiment, bacterial strain(s) of the invention is(are) administered as and when found in a food-based product, or is(are) administered in association with a food-based product. Carrier or delivery vehicle(s) as mentioned herein are adapted accordingly, following the conventional practice in the field.

[0070] According to a particular embodiment, probiotic effect is achieved when the bacterial strain(s) of the invention is(are) delivered to the gastro-intestinal tract (GIT) of the fishes to be treated. Instant application demonstrates colonisation of the gastro-intestinal tract of treated fishes.

[0071] According to a particular embodiment, probiotic effect is achieved when the bacterial strain(s) are alive (live bacteria), or at least in a viable state, or capable of being rehydrated and/or revived and/or revitalized so as to be alive when put in contact with the intended host.

[0072] According to a particular embodiment, applicable throughout the description, bacterial strain(s) of the invention is(are) live bacterium(a).

[0073] Nothwistanding the above and according to a particular embodiment, bacterial strain(s) of the invention is(are) lyophilized. Lyophilized commercial preparations have advantages for storage and transport.

[0074] In a particular embodiment, bacterial strain(s) of the invention are encapsulated. Probiotics encapsulation is also a convenient mean to enhance probiotics stability, facilitate handling and storage of probiotic cultures and to protect the bacteria from detrimental conditions (e.g., oxygen contact, freezing temperature(s) or acidic environment) during production, storage and gastrointestinal transit when relevant. It may also be adapted for administration of bacteria directly into fishes raising water. By “encapsulated” it is therefore meant that the bacteria have been submitted to an encapsulation process defined as a process by which cells, especially live cells, are packaged within a shell material to offer protection against unfavourable environmental conditions and possibly (not mandatorily) allowing for their controlled release under intestinal conditions. Several methods are known in the art for encapsulation of probiotics, such as spray drying, extrusion, emulsion or phase separation, freeze drying, ionotropic gelation, etc. This list is not limitative. Probiotic encapsulation technology (PET) commonly allows for microorganisms immobilization within semipermeable and/or biocompatible materials. The literature readily provides to the skilled person examples and guidance regarding encapsulation, see, for example, Prado et al. Applied Microbiology and Biotechnology volume 104, pages 1993-2006(2020) doi.org/10.1007/s00253-019-10332-0, or Amir et al. Fish & Shellfish Immunology, Volume 95. December 2019, Pages 464-472 doi.org/10.1016/j.fsi.2019.11.011, or Hai N.V., Journal of Applied Microbiology 119, 917-935, 2015, doi.org/10.1111/jam.12886. Accordingly, carrier or delivery vehicle(s) as mentioned herein encompass those allowing for encapsulation of bacterial strain(s) of the invention.

[0075] Conversely, a bacterial strain or combination of bacterial strains of the invention, may be found in a composition, wherein the said composition consists essentially of, or consists of, at least one bacterial strain and an acceptable carrier or delivery vehicle(s) and optionally adjuvant component(s).

[0076] Such a composition may allow the bacterial strain or combination of bacterial strains of the invention, according to all embodiments described herein, to be found as a formulation adapted for the intended purpose, with carrier or delivery vehicle(s) chosen to meet the formulation requirements. Formulations can encompass: liquid or powder formulations, capsules, powder beads, tablets, encapsulated bacterial strain(s) as described above, appropriately formulated (e.g., within a liquid), and/or food-products(s) when food is added.

[0077] It is to be understood that the skilled person can readily determine suitable carrier(s) or delivery vehicle(s) to be found in such a “composition” or “formulation”; Details are provided above and herein.

[0078] According to a particular embodiment, applicable throughout the description, when a combination of distinct bacterial strains is used, said bacterial strains are administered to a host in need thereof simultaneously or separately in any order, or sequentially in any order.

[0079] According to a particular embodiment, applicable throughout the present description, the bacterial strain(s) of the present invention are isolated bacterial strain(s).

[0080] By “probiotic” it is meant that the bacterial strain(s) or combination thereof have the capability of exerting a beneficial effect on the organism to which they are administered, preferably a beneficial effect on the health status. Probiotics are organisms, which when they are administered to an host, especially but not exclusively as a food ingredient, or as an add-on to a food ingredient (therefore not necessarily strictly administered as a meal) confer a health benefit to the host. The beneficial effects may be achieved through interactions of the bacterial strain(s) or combination thereof in the context of the invention, with the microbiota of the host to which they are administered. Accordingly, the “probiotic” feature used as an adjective to qualify the bacterial strain(s), active ingredient(s), composition(s), and other food or liquid product(s) described herein, means that the same has the intended functionality encompassed by the “probiotic” definition.

[0081] In a particular aspect, colonization of gastrointestinal tract by the bacterial strains of the invention has been demonstrated herein, as well as protection and increased survival of the host after administration of the bacterial strains of the invention, as beneficial effects.

[0082] According to a particular embodiment, “probiotic” or “probiotic effect” means the capability to colonize the gastrointestinal tract of the host to which the probiotic is administered.

[0083] According to another particular embodiment, which can be in addition to other features, including the above feature, “probiotic” or “probiotic effect” means the capability to protect the host to which the probiotic is administered, from the deleterious effect on health status from an infection by another pathogen, such as the F. columnare pathogen. In this respect deleterious effects on health status resulting from an infection by the F. columnare pathogen are thoroughly described herein. Any of the effects reversing, even partly, the deleterious effects of the same on the host, can be said to participate to a probiotic effect or constitute a probiotic effect. The skilled person can therefore determine whether a probiotic effect is achieved, by comparison to an absence of treatment, by observing the obtained beneficial effects on health status.

[0084] According to another particular embodiment, which can be in addition to other features, including the above features, “probiotic” or “probiotic effect” means the capability to confer increased survival of the host or population of hosts after administration of the bacterial strains of the invention. The experimental section herein also provides guidance regarding how to evaluate whether increased survival is conferred to an host or population of hosts after administration of the bacterial strains of the invention. The skilled person can therefore determine whether a probiotic effect is achieved according to this criteria, by comparison to an absence of treatment, by observing the increased survival effect obtained on the host or population of hosts. The data provided herein shows that the invention confers beneficial effects to the hosts to which it is administered, on their health, and increase their survival, even after challenge by a pathogen.

[0085] According to the invention, the host is a fish, in particular a teleostean fish (i.e., a fish of the Teleostei infraclass), preferably a fish that may be affected by or affected by columnariosis diseases.

[0086] In a particular embodiment, the fish is selected amongst one or several of the species listed in the below table: those species are commonly cultivated fishes.

| Common name | Binomial name |
|---|---|
| Grass carp | Ctenopharyngodon idella |
| Peruvian anchoveta | Engraulis ringens |
| Silver carp | Hypophthalmichthys molitrix |
| Common carp | Cyprinus carpio |
| Asari, | Venerupis philippinarum |
| Japanese littleneck, | |
| Manila clam, | |
| Filipino Venus, | |
| Japanese cockle, | |
| Japanese carpet shell | |
| Alaska pollock | Theragra chalcogramma |
| Nile tilapia | Oreochromis niloticus |
| Whiteleg shrimp | Penaeus vannamei |
| Bighead carp | Hypophthalmichthys nobilis |
| Skipjack tuna | Katsuwonus pelamis |
| Catla | Catla catla |
| Crucian carp | Carassius carassius |
| Atlantic salmon | Salmo salar |
| Atlantic herring | Clupea harengus |
| Chub mackerel | Scomber japonicus |
| Rohu | Labeo rohita |
| Yellowfin tuna | Thunnus albacares |
| Japanese anchovy | Engraulis japonicus |
| Largehead hairtail | Trichiurus lepturus |
| Atlantic cod | Gadus morhua |
| European pilchard | Sardina pilchardus |
| Capelin | Mailotus villosus |
| Jumbo flying squid | Dosidicus gigas |
| Milkfish | Chanos chanos |
| Atlantic mackerel | Scomber scombrus |
| Rainbow trout | Oncorhynchus mykiss |
| Giant tiger prawn | Penaeus monodon |
| Asian tiger shrimp | |
| Araucanian herring | Clupea bentincki |
| Chinese razor clam | Sinonovacula constricta |
| Agemaki clam | |
| Chinese mitten crab | Eriocheir sinensis |
| Wuchang bream | Megalobrama amblycephala |
| Pacific oyster | Crassostrea gigas |
| Japanese oyster | |
| Miyagi oyster | |
| Louisiana crawfish | Procambarus clarkil |
| Red swamp crawfish | |
| Akiami paste shrimp | Acetes japonicus |
| Gulf menhaden | Brevoortia patronus |
| Indian oil sardine | Sardinella longiceps |
| Black carp | Mylopharyngodon piceus |
| European anchovy | Engraulis encrasicolus |
| Northern snakehead | Channa argus |
| Pacific cod | Gadus macrocephalus |
| Pacific saury | Cololabis saira |
| Pacific herring | Clupea pallasii |
| Bigeye tuna | Thunnus obesus |
| Chilean jack mackerel | Trachurus murphyi |
| Yellow croaker | Larimichthys polyactis |
| Haddock | Melanogrammus aeglefinus |
| Gazami crab | Portunus trituberculatus |
| Amur catfish | Silurus asotus |
| Japanese common | |
| catfish | |
| European sprat | Sprattus sprattus |
| Pink salmon | Oncorhynchus gorbuscha |
| Mrigal carp | Cirrhinus mrigala |
| Channel catfish | Ictalurus punctatus |
| Blood cockle | Anadara granosa |
| Blue whiting | Micromesistius poutassou |
| Hilsa shad | Tenualosa ilisha |
| Daggertooth pike conger | Muraenesox cinereus |
| California pilchard | Sardinops caeruleus |
| Cape horse mackerel | Trachurus capensis |
| Pacific anchoveta | Cetengraulis mysticetus |
| Japanese flying squid | Todarodes pacificus |
| Argentine shortfin squid | Illex argentinus |
| Pollock | Pollachius virens |
| Chinese softshell turtle | Pelodiscus sinensis |
| Kawakawa | Euthynnus affinis |
| Indian mackerel | Rastrelliger kanagurta |
| Asian swamp eel | Monopterus albus |
| Yesso scallop | Patinopecten yessoensis |
| Argentine hake | Merluccius hubbsi |
| Northern prawn | Pandalus borealis |
| Short mackerel | Rastrelliger brachysoma |
| Southern rough shrimp | Trachysalambria curvirostris |
| Southern African | Engraulis capensis |
| anchovy | |
| Pond loach | Misgurnus anguillicaudatus |
| Iridescent shark | Pangasius hypophthalmus |
| Mandarin fish | Siniperca chuatsi |
| Chinese perch | |
| Nile perch | Lates niloticus |
| Round sardinella | Sardinella aurita |
| Japanese pilchard | Sardinops melanostictus |
| American sea scallop | Placopecten magellanicus |
| Bombay-duck | Harpadon nehereus |
| Yellowhead catfish | Tachysurus fulvidraco |
| Korean bullhead | |
| Narrow-barred Spanish | Scomberomorus commerson |
| mackerel | |
| Albacore | Thunnus alalunga |
| Madeiran sardinella | Sardinella maderensis |
| Bonga shad | Ethmalosa fimbriata |
| Silver cyprinid | Rastrineobola argentea |
| Nile tilapia | Oreochromis niloticus |
| Longtail tuna | Thunnus tonggol |
| Atlantic menhaden | Brevoortia tyrannus |
| Giant tiger prawn | Penaeus monodon |
| North Pacific hake | Merluccius productus |
| Atlantic horse mackerel | Trachurus trachurus |
| Japanese jack mackerel | Trachurus japonicus |
| Pacific thread herring | Opisthonema libertate |
| Bigeye scad | Selar crumenophthalmus |
| Yellowstripe scad | Selaroides leptolepis |
| Chum salmon | Oncorhynchus keta |
| Antarctic krill | Euphausia superba |
| Blue swimming crab | Portunus pelagicus |
| Pacific sand lance | Ammodytes personatus |
| Pacific sandlance | |
| Goldstripe sardinella | Sardinella gibbosa |

[0087] According to a particular embodiment, the fish is selected amongst: eels (Anguilla sp.), salmonids (Oncorhynchus sp. and Salmo sp.), tilapia (Oreochromis sp.), hybrid-striped bass (Morone chrysops x M. saxatilis), walleye (Stitzostedion vitreum), channel catfish, cetrachids (such as largemouth bass (Micropterus salmoides)), bait minnows (Pimephales promelas), goldfish (Carassisu auratus), carp (Cyprinus carpio) and aquarium fish (tropical fish species such as black mollies (Poecilia sphenops)) and platies (Xiphophorus maculatus).

[0088] Such fishes are commonly known as being target fish species of F. columnare pathogen.

[0089] According to a particular embodiment, the fish is a rainbow trout (synonym for Oncorhynchus mykiss, throughout the present description).

[0090] According to a particular embodiment, the treated fish is at any stage of its development. It may for example be an egg, a larvae especially without a fully mature/developed immune system, an adult, including an adult with or without a fully mature/developed immune system. The fish may be immune-compromised.

[0091] According to a preferred embodiment, the treated fish is within a population of treated fishes that includes larvae, or the treated animal is a fish larvae.

[0092] In a particular embodiment, the treated host is a fish larvae.

[0093] According to a particular embodiment, the treated fish is a rainbow trout and is within a population of treated rainbow trout that includes larvae, or is a rainbow trout larvae.

[0094] Accordingly, in a particular embodiment, the fish (or some of the fishes) is a rainbow trout at larval stage of development.

[0095] According to a particular embodiment, the treated fish is found in aquaculture settings or fish husbandry settings.

[0096] As stated above, the strains of use within instant invention may be defined through a single parameter or a series of parameters that applies cumulatively, e.g., an ANI value and/or a so-called “16S” value, and may be furthered by a functional definition.

[0097] According to a particular embodiment, bacterial strain(s), including when found in a combination according to the invention, keep the property(ies), especially the biological property(ies), more specifically the probiotic property(ies), of the natural counterpart(s) from which they derive. The property(ies) of said natural counterpart(s) can be readily determined by the tests disclosed in the experimental section of the present description. Determination of whether or not bacterial strain(s) of instant invention keep the said property(ies) can be readily made by comparison, or by a comparative assay, or by an entire assay following the guidance provided herein.

[0098] According to a particular embodiment, the bacterial strain(s), including when found in a combination according to the invention, is(are) selected from bacterial strain(s) that comprise(s) a 16s rDNA sequence with at least 97% sequence identity, in particular at least 98% or at least a 99% sequence identity, to a 16s rDNA sequence present in the Chryseobacterium massiliae strain identified by Accession Number No. I-5479 deposited at the CNCM on Jan. 24, 2020, or the Flavobacterium. sp strain identified by Accession Number No. I-5481 deposited at the CNCM on Jan. 24. 2020, respectively.

[0099] Cumulatively or alternatively to the above, the bacterial strain(s), including when found in a combination according to the invention, is(are) selected from bacterial strain(s) that comprise(s) a 16s rDNA sequence with at least 97% sequence identity to a 16s rDNA sequence present in a reference sequence of Chryseobacterium massiliae or Flavobacterium. sp strain, respectively.

[0100] Examples of references sequences are described above: they may be Chryseobacterium massiliae CCUG 51329 and Flavobacterium spartani ATCC BAA-2541, respectively. Percentages can be as described in any embodiment or paragraph described herein.

[0101] Cumulatively or alternatively to the above, the bacterial strain(s), including when found in a combination according to the invention, is(are) selected from bacterial strain(s) that comprise(s) a 16s rDNA sequence with at least 97% sequence identity to SEQ ID NO:3, or SEQ ID NO:4, respectively. These are the sequences corresponding to the 16s rDNA sequences as found in SEQ ID NO:1 and SEQ ID NO:2, respectively, the boundaries of the said 16s rDNA sequence being readily determinable to the skilled person by reference to the annotations found in databases entries, and by common knowledge.

[0102] According to particular embodiments, the sequence identity using a so-called 16s rDNA sequence taxonomic classification tool can reach 98% or more, 99% or more, or be 100%.

[0103] The skilled person has knowledge regarding how to implement 16s rDNA sequence taxonomic classification and in particular determine an at least 97% sequence identity, as this technique is well documented in the literature and guidance is provided herein (see for instance discussed herein, and the experimental section).

[0104] The literature provides details regarding the particularities of 16s rDNA sequence taxonomic classification. In particular, identity percentages can conventionally be calculated through local, preferably global, sequence alignment algorithms and their available computerized implementations. In a most preferred embodiment, identity percentages are calculated over the entire length of the compared 16 s rDNA sequences. Global alignments, which attempt to align every residue in every sequence, are most useful when the sequences in the query set are similar and of roughly equal size. Computerized implementations of the algorithms used are generally associated with default parameters in the literature, which can be used for running said alogorithm. The skilled person can readily adapt the same taking into account its objective or the sequences comparison made.

[0105] Whatever the algorithm used, it is however admitted that a value of 97% identity between 16s rDNA sequences is an appropriate cutoff value for distinguishing between two species, i.e., for classifying the genome of the strain whose classification is sought, within an existing species (as annotated in databases) or to define a new, unknown to date, species.

[0106] According to a particular embodiment, the bacterial strain(s), including when found in a combination according to the invention, is(are) selected from bacterial strain(s) that:is(are) from the group consisting of: a Chryseobacterium massiliae strain identified by Accession Number No. I-5479 deposited at the CNCM on Jan. 24, 2020 (SEQ ID NO: 2) and a Flavobacterium sp. strain identified by Accession Number No. I-5481 deposited at the CNCM on Jan. 24, 2020 (SEQ ID NO: 1).

[0107] Throughout the present application, CNCM stands for Collection Nationale de Cultures de Microorganismes (Institut Pasteur, 25 rue du Docteur Roux, F-75724 Paris Cedex 15, France).

[0108] According to a particular embodiment, the invention relates to a Chryseobacterium massiliae bacterial strain, especially the Chryseobacterium massiliae strain identified by Accession Number No. I-5479 deposited at the CNCM on Jan. 24, 2020 (SEQ ID NO:2), for use as a probiotic.

[0109] The Chryseobacterium massiliae bacterial strain with Accession Number No. I-5479 is also known the the CNCM under Identification reference UGB 3610. This bacterial strain has been isolated from zebrafish. An example of suitable growth medium is a combination of Tryptone Yeast Extract Salts and R2A Agar (Reasoner's 2A Agar). Suggested incubation conditions are: 28° C., aerobie, 250 r.p.m. (revolution per minute) shaking.

[0110] According to a particular embodiment, the invention relates to a Flavobacterium sp. bacterial strain, especially the Flavobacterium sp. strain identified by Accession Number No. I-5481 deposited at the CNCM on Jan. 24, 2020 (SEQ ID NO:1), for use as a probiotic.

[0111] The Flavobacterium sp. bacterial strain with Accession Number No. I-5481 is also known the the CNCM under Identification reference UGB 4466. This bacterial strain has been isolated from rainbow trout. An example of suitable growth medium is R2A Agar (Reasoner's 2A Agar). Suggested incubation conditions are: 20° C., aerobie, 250 r.p.m. (revolution per minute) shaking.

[0112] According to a particular embodiment, the bacterial strain or combination of bacterial strains is for use as defined herein so that the at least one bacterial strain(s) is(are) administered to:
[0113] a. a host that is a fish, in particular a teleostean fish, more particularly a rainbow trout, especially larvae thereof, or
[0114] b. hosts comprising or consisting essentially of or consisting of homogenous or mixed population(s) of fishes, for example a population(s) encompassing fishes such as rainbow trout at distinct stages of their development or growth.

[0115] By “homogenous” population(s) of fishes, it is meant population(s) of fishes whose individuals essentially pertain to the same species, or strictly pertain to the same species. According to a particular aspect, such “homogenous” population(s) may encompass fishes at different stages of their development, or fishes with sensibly the same developmental stage.

[0116] Conversely, by “mixed” population(s) of fishes, it is meant population(s) of fishes whose individuals pertain to distinct species, i.e., encompass distinct fish species. According to a particular aspect, such “mixed” population(s) may still encompass fishes at different stages of their development, or fishes with sensibly the same developmental stage.

[0117] The developmental stage of fishes may be: eggs, larvae, juvenile fish, adults without or with a mature immune system.

[0118] According to a particular embodiment, the developmental stage of a fish administered with the active ingredient(s) of instant invention is the larval developmental stage (in case of a population of fishes, it means that said population encompasses fish larvae, at least in part, or entirely). Basically, the larval stage lasts from hatching up to the juvenile stage, defined as the moment where all fin rays are present on the fish and the growth of fish scales has started (squamation). A key event for defining the end of the larval stage and the beginning of the juvenile stage is when the notochord associated with the tail fin on the ventral side of the spinal cord develops flexion (becomes flexible). Of note, the larval stage can be further subdivided into preflexion, flexion, and postflexion stages, or subdivided between the yolk-sac larval stage and transformation stage, which follows absorption of the yolk-sac (the latter ending the yolk-sac larval stage). Although these provisions are not strict so that juvenile fish or fishes in other developmental stage, including adults, cannot be administered with the active ingredient(s) described herein, it is observed that since fishes vaccination is commonly known not to be efficient or relevant at the larval stage, instant invention provides a clear advance to the art when fishes in the larval stage are treated, i.e., fishes at a stage where vaccination is thought to fail.

[0119] In a particular aspect applicable throughout the description, a combination as defined herein may additionally comprise at least one another bacterial strain of the indigenous microbiota of the treated host species or a host species within the treated population of hosts.

[0120] Examples of associations of several bacterial strains from the indigenous microbiota of a fish can be:
[0121] With respect to the rainbow trout: Delftia acidovorans, Flavobacterium sp, Aeromonas rivipollensis, Pseudomonas helmanticensis, Aeromonas rivipollensis, Pseudomonas baetica, Aeromonas hydrophyla, Flavobacterium plurextorum, Acinetobacter sp., Flavobacterium plurextorum and Pseudomonas sp.
[0122] With respect to the zebrafish (Danio rerio throughout the present description): Chryseobacterium massiliae. Aeromonas veronii, Pseudomonas mossellii, Stenotrophomas maltophilia, Aeromonas caviae, Pseudomonas peli, Pseudomonas sediminis, Phyllobacterium myrsinacearum, Pseudomonas nitroreducens.

[0123] According to another aspect, the bacterial strain(s) or combination thereof of the present invention are further suitable, as probiotics or in themselves, for (one or several amongst the following list, according to all possible combinations thereof):
[0124] a. preventing the occurrence of an infection by the Flavobacterium columnare pathogen in the host(s) fish species or treated population of hosts fish species,
[0125] b. preventing the occurrence of a further infection, or minimizing the consequences of an ongoing infection, by the Flavobacterium columnare pathogen in the host(s) fish species or treated population of hosts fish species, and/or
[0126] c. enhancing the resistance against the Flavobacterium columnare pathogen of the treated host(s) fish species or treated population of hosts fish species, and/or
[0127] d. preventing or minimizing the extent (spread and consequences) of subsequent infections by the Flavobacterium columnare pathogen in the host(s) fish species or treated population of hosts fish species, or enhancing the resistance against the Flavobacterium columnare pathogen of the treated host(s) fish species or treated population of hosts fish species, and/or
[0128] d. preventing or controlling diseases, notably caused by an infection with the Flavobacterium columnare pathogen, in the treated host(s) fish species or treated population of hosts fish species, especially preventing or minimizing disease propagation within the treated population of hosts fish species, and/or
[0129] e. increasing the lifespan of treated host(s) fish species or population of treated hosts fish species, or reducing the mortality of treated host(s) species or population of treated hosts fish species.

[0130] The invention concerns, as a “pathogen” constantly, or regularly, or susceptible to be present, in aquaculture settings, the Flavobacterium columnare pathogen, pertaining to the Flavobacterium genus. Information about that pathogen can for example be found in “Columnaris Disease in Fish: A Review With Emphasis on Bacterium-Host Interactions” (DOI: 10.1186/1297-9716-44-27, Declerq et al. Veterinary Research 2013, 44:27)

[0131] Infections of fishes with Flavobacterium columnare may arise in the context of seasonal diseases outbreaks in aquaculture farming settings: these infections arising in the context of seasonal outbreaks are also infections of interest in the context of the present invention.

[0132] Instant invention concerns, according to a particular aspect, the prevention of occurrence(s) of infection of a fish, by the Flavobacterium columnare pathogen. In this aspect, the administration of active ingredient(s) of the invention are conceived in a prophylactic manner, the host not having been infected by the pathogen.

[0133] As used herein, “infection” means the invasion and multiplication of the pathogen in the host's body. It will be appreciated that an infection may cause or not symptoms, being subclinical or clinically apparent, respectively An infection may remain localized, or it may spread through the blood or lymphatic vessels to become systemic (bodywide)

[0134] Whether the considered fish has already been infected or is at risk of being infected by a Flavobacterium columnare pathogen, and whether the concerned fish is asymptomatic or symptomatic for an infection by Flavobacterium columnare, instant invention also concerns enhancement of the resistance of the considered fish against the Flavobacterium columnare pathogen.

[0135] According to another aspect, the invention also concerns the prevention and/or control of diseases, notably caused by an infection with the Flavobacterium columnare pathogen, i.e., a disease whose initial cause is the existence of an infection with this pathogen, or a disease who is known to be caused by or is known to be strongly correlated with a pre-infection of the host by this pathogen (according to a cause-consequence relationship).

[0136] Therefore according to a particular embodiment, the bacterial strain(s) or combination thereof of the present invention are used against diseases caused (or induced, or resulting of) by infections by the Flavobacterium columnare bacteria, the disease being in particular columnaris disease.

[0137] The most known disease directly caused by an infection with Flavobacterium columnare, columnaris disease (also spelled Columnariosis disease in the literature).

[0138] According to a particular embodiment, the invention aims at mitigating rainbow trout fish diseases, especially columnaris disease (also termed Columnariosis disease in the literature). In this context and according to a particular embodiment, the disease is columnaris disease, so that the invention is aimed at mitigating columnaris diseases in fishes affected Flavobacterium columnare. When the fish is a rainbow trout, the invention is is aimed at mitigating rainbow trout columnaris disease.

[0139] By “increasing the lifespan of treated host(s) species or population of treated hosts species” it is conversely meant “reducing the mortality of treated host(s) species or population of treated hosts species”, since it will be understood that the active ingredients of present invention have a beneficial effect on the hosts organisms so that comorbidity events resulting from pathogens infections are minimized or alleviated, at the level of the single individual and/or at the level of a whole population of hosts. The mortality reduction can be readily assessed by the skilled person by observation of the treated host(s) species or population of treated hosts' species. The lifespan increase can also be readily assessed by the skilled person in light of the prior occurrence of events known to be detrimental to the health condition of the treated fish, or by statistical assessment considering a distinct observation carried out on non-treated fishes, or similar information that can be extrapolated or derived from common knowledge of the skilled person in the art.

[0140] “Increase of the lifespan” or “reduction of the mortality” can also be achieved through disease mitigation, alleviation, cure, management or control, at the level of a whole population of fishes. Diseases are discussed above.

[0141] According to a specific embodiment, the invention aims at mitigating rainbow trout fish diseases, especially columnaris disease, in the context of aquaculture research or husbandry.

[0142] According to a specific embodiment, the bacterial strains or combination thereof is (are) administered to a teleostean fish or a population encompassing a teleostean fish, more particularly a rainbow trout or a population encompassing a rainbow trout or, in aquaculture settings or fish husbandry settings. Apart trouts, a list of fishes is provided in the Table above, which is referred to in the present paragraph. Particular fishes are indicated as well, above.

[0143] Aquaculture settings may be natural settings or tanks, in fresh water or sea water, in flow-through or recirculation water feed management.

[0144] According to a specific embodiment, the bacterial strains or combination thereof is(are) used for preventing or mitigating a rainbow trout fish disease in aquaculture settings or fish husbandry settings while a pathogen, especially a pathogen as defined in any embodiment herein, has been detected in the aquaculture settings or fish husbandry settings, especially the rainbow trout fish disease that is columnaris disease.

[0145] According to a particular embodiment, bacterial strains or combination thereof, including their variant(s), is(are) introduced into fishes commensal microbial community by adding directly the bacterial strains or combination thereof into the fish raising water, in form of live bacteria.

[0146] Possible administration routes, and modes of administration to hosts to be treated, can be deduced of the different embodiments and/or formulations of the active ingredient(s) to be delivered, detailed in the present description, here above:
[0147] Active ingredient(s) of the present invention can be delivered in individualized form or within mixtures of active ingredients, with extra components or not. Active ingredient(s) may be encapsulated, and/or
[0148] Active ingredient(s) can be administered as, non limitatively recited, capsules, liquids, powder, powder beads, tablets . . . and/or
[0149] Active ingredient(s) may be administered, in any form or type of formulation as described herein, along with meals (such as with so-called fish meal, and/or fish oil), or when contained within food products. Accordingly, instant invention also concerns a kit comprising or consisting essentially of, or consisting of active ingredient(s) of instant invention, according to any embodiment recited herein, and at least one food product, in particular a fish food product, and if appropriate a leaflet for administration instructions with a view of achieving the effect(s) described herein.

[0150] Accordingly, active ingredient(s) of the invention can be administered directly into the hosts' environment, for example when added to the water where fishes, including larvae, live and grow, or be directly administered to the hosts' body, by any route, especially routes involving, i.e., allowing the bacterial strain(s) to be put into contact with, the gastro-intestinal tract (GIT) of the fish (liquid or food).

[0151] The invention is generally described herein using the wording “for use” when applications are contemplated. Using a synonymous wording, the invention also relates to method(s) of administering to a host in need thereof, in particular a fish, probiotic active ingredient(s) as defined in any of the embodiments described herein, including variants. All instances of “for use” can therefore we reworded as method(s) of administering the active ingredients including variants described herein to a host, for the purpose(s) described herein, according to any described embodiment.

[0152] The invention also relates to method(s) for:
[0153] a. preventing the occurrence of a further infection by a Flavobacterium columnare pathogen, or minimizing the consequences of an ongoing infection by a Flavobacterium columnare pathogen, and/or
[0154] b. enhancing the resistance against a Flavobacterium columnare pathogen, and/or
[0155] c. preventing or minimizing the extent (spread and consequences) of subsequent infections by a Flavobacterium columnare pathogen, or enhancing the resistance against a Flavobacterium columnare pathogen, and/or
[0156] d. preventing or controlling diseases, notably caused by an infection by the Flavobacterium columnare pathogen, especially preventing or minimizing disease propagation within the treated population of hosts species, and/or
[0157] e. increasing the lifespan of treated host(s) species or population of treated hosts species), or reducing the mortality of treated host(s) species or population of treated hosts species, which is(are) preferably fish(es).

[0158] In host(s) species or treated population of hosts species, which is(are) preferably fish(es), administered with active ingredient(s) of instant invention, according to any embodiment described herein for administration to the host(s).

[0159] The invention also relates to a bacterial strain selected from the group consisting of: a Chryseobacterium massiliae strain identified by Accession Number No. I-5479 deposited at the CNCM on Jan. 24, 2020 (SEQ ID NO: 2) and a Flavobacterium sp. strain identified by Accession Number No. I-5481 deposited at the CNCM on Jan. 24, 2020 (SEQ ID NO:1), or variants thereof wherein one or more virulence factor coding gene(s) and/or antibiotic resistance genes is(are) deleted or inactivated.

[0160] When full or lengthy genome sequences are considered, especially by way of reference to the SEQ ID NOs of the present disclosure, but also by way of reference to sequences that can be obtained by sequencing the genome of deposited strains, as described herein, it can be appreciated that the claimed invention shall not be affected by errors arising from the sequencing process. Examples of protocols and sequencing methods are provided herein and are well known from the skilled person, who can readily determine sequencing error(s) according to common knowledge.

[0161] According to a particular embodiment, the bacterial strain is an isolated bacterial strain.

[0162] According to a particular embodiment, the bacterial strain is an isolated and live bacteria. According to a particular embodiment, the bacterial strain is an isolated and lyophilized bacterial strain, which however keeps the property of being rehydrated and/or revived and/or revitalized, when relevant.

[0163] According to another aspect, the invention also encompass:
[0164] (i) a Chryseobacterium massiliae strain with at least 95% or more Average Nucleotide Identity (ANI) value with the Chryseobacterium massiliae strain identified by Accession Number No. I-5479 deposited at the CNCM on Jan. 24, 2020 (also disclosed under SEQ ID NO:2), but differing from the later by at least one (i.e., one, two, three or more) nucleotide deletion or substitution with respect to the natural deposited strain, especially through nucleotide deletion or substitution achieved by non-natural sequence engineering, so that the resulting strain does not have any natural counterpart, especially any genetically identical counterpart, but keeps the property(ies) detailed herein with respect to strain No. I-5479,
[0165] (ii) a Flavobacterium. sp. Strain, with at least 95% or more Average Nucleotide Identity (ANI) value with the Flavobacterium sp. strain identified by Accession Number No. I-5481 deposited at the CNCM on Jan. 24, 2020 (also disclosed under SEQ ID NO: 1), but differing from the later by at least one (i.e., one, two, three or more) nucleotide deletion or substitution with respect to the natural deposited strain, especially through nucleotide deletion or substitution achieved by non-natural sequence engineering, so that the resulting strain does not have any natural counterpart, especially any genetically identical counterpart, but keeps the property(ies) detailed herein with respect to strain No. I-5481,
[0166] (iii) or variants of a Chryseobacterium massiliae strain with at least 95% or more Average Nucleotide Identity (ANI) value with the Chryseobacterium massiliae strain identified by Accession Number No. I-5479 deposited at the CNCM on Jan. 24, 2020 (also disclosed under SEQ ID NO:2), or a variant of a Flavobacterium. sp. Strain, with at least 95% or more Average Nucleotide Identity (ANI) value with the Flavobacterium sp. strain identified by Accession Number No. I-5481 deposited at the CNCM on Jan. 24, 2020 (also disclosed under SEQ ID NO: 1), or a variant of any one of the above strains of (i) or (ii), according to all described embodiments, wherein one or more virulence factor coding gene(s) and/or antibiotic resistance genes is(are) deleted or inactivated.

[0167] It is to be understood that instant invention also encompass a strain modified, engineered so as to differ from any naturally existing strain, although being structurally close from the naturally identified strain, and keeping the property(ies) detailed herein with respect to the deposited strains described herein by reference to Accession Numbers at the CNCM, or by reference to full genome sequences. Variants described herein fall within this embodiment.

[0168] The invention conversely also concerns a food product, especially a fish food product, solid or liquid, comprising bacterial strain(s) of the invention, as described in any embodiment herein including variants, or mixture thereof.

[0169] The invention also concerns encapsulated bacterial strain(s) of the invention, as described in any embodiment herein including variants, or mixture thereof.

[0170] The invention also concerns the use of bacterial strain(s) of the invention, as described in any embodiment herein including variants, or mixture thereof, or encapsulated bacterial strain(s) of the invention, as described in any embodiment herein including variants, or mixture thereof, or compositions of the invention as described herein, as additives (to food products), especially probiotic additives to food products. Food products may be dry (solid) or liquid products.

[0171] In a particular embodiment, bacterial strain(s) of the invention including variants is(are) administered as and when found in a food-based product, or is(are) administered in association with a food-based product. Carrier or delivery vehicle(s) as mentioned herein are adapted accordingly, following the conventional practice in the field. When in a food product or administered in association with a food product, bacterial strain(s) may be encapsulated.

[0172] Dosage can be readily determined by the skilled person, as conventionally done in the field.

[0173] According to a particular embodiment, bacterial strains or combination thereof including variants is(are) administered to a host in need thereof in a dosage or in a formulation enabling a final liquid dosage ranging from 5×10⁴ cfu/mL to 5×10⁶, or up to 5×10⁸ cfu/mL of active ingredient(s), in particular a dosage of 5×10⁵ cfu/mL. The invention extends to a dry/solid dosage enabling a liquid dosage equivalent to the dosage described above. Dosage applied to dry forms may be expressed in grams instead of mL. This range and particular values are susceptible of conferring a total protection to the host, especially a fish host, against subsequent infections by Flavobacterium columnare pathogen. In this context, the level of protection achieved can be evidenced by in vivo infection challenges using gnotobiotic zebrafish or rainbow trout as an animal model, examples of which are described herein or in the literature. Examples described herein show that whereas F. columnare killed Germ Free (GF) fish larvae in less than 48 h, fish exposed to Chryseobacterium massiliae or Flavobacterium sp. strains of the invention were more resistant to the infection, with an increase in survival up to 90% by reference to experiment where no protective bacterial strain(s) of the invention were administered to the model. Accordingly, it can be defined that “total” protection can be assessed by an in vivo infection challenge test using gnotobiotic zebrafish or rainbow trout as an animal model, where an increase in survival of the model up to 90% can be observed after administration of the considered strain(s) of the invention to the model. Guidance can be found in the experimental section regarding the implementation of this test.

[0174] Of note, such a dosage enabling a “total” protection requires concentration of the active ingredient(s), which is mark of technical engineering brought to the administered product.

[0175] The invention also relates to a probiotic composition comprising or consisting essentially of, or consisting of, at least one bacterial strain selected from the group consisting of: a Chryseobacterium massiliae strain and a Flavobacterium. sp. strain with at least 95% or more Average Nucleotide Identity (ANI) value with the Flavobacterium sp. strain identified by Accession Number No. I-5481 deposited at the CNCM on Jan. 24, 2020, according to any combination thereof, in particular at least two or three distinct bacterial strains from said group, and further acceptable carrier or delivery vehicle(s) and optionally adjuvant component(s).

[0176] The bacterial strain that can be found in compositions of the invention, are the same as those described in the present description, especially above, in the context of their intended administration, notably encompassing all described variations and embodiments.

[0177] In particular probiotic compositions of the invention can encompass variants of naturally existing strain(s), as defined herein especially with respect to modified strains, engineered so as to differ from any naturally existing strain, and keeping the property(ies) detailed herein with respect to the deposited strain(s) described herein by reference to Accession Number(s) at the CNCM.

[0178] Probiotic compositions of the invention also encompass compositions comprising or consisting essentially of or consisting of any strain as described herein or mixture thereof, at a dosage enabling “total” protection of the host as defined herein.

[0179] By acceptable carrier or delivery vehicle(s), it is meant any substance, agent, ingredient, that can be safely administered to a host for the purpose of delivering the active ingredients to said host so that they can achieve their function, i.e, their probiotic function. They may be water or another other liquid, or other acceptable substance, agent, ingredient. They may be pharmaceutical or veterinary carrier or delivery vehicle(s). They may be food. Details regarding acceptable carrier or delivery vehicle(s) can be found above in the present description, these sections are referred to also in the context of composition(s) as described herein. When food is used as a vehicle for probiotic bacteria or compositions of the invention, it can enable that the probiotics will arrive to the fish gut.

[0180] Is also described a probiotic composition comprising a Flavobacterium sp. strain of the invention (characterized by reference to a deposited strain—see present description), and further comprising the following bacterium: the Delftia acidovorans strain identified by Accession Number No. I-5480 deposited at the CNCM on Jan. 24, 2020 ((sequence available in ENA (European Nucleotide Archive) database under primary accession number ERS4574863 (version 1) and secondary accession). Aeromonas rivipollensis, Pseudomonas helmanticensis, Aeromonas rivipollensis, Pseudomonas baetica, Aeromonas hydrophyla, Flavobacterium plurextorum, Acinetobacter sp., Flavobacterium plurextorum, Pseudomonas sp.

[0181] In this context, said bacterium may be isolated from the microbiota of a trout, in particular a rainbow trout.

[0182] According to another aspect described herein, a composition comprises a Chryseobacterium massiliae strain and further comprises the following bacterium: at least one Aeromonas veronii strain, in particular two distinct Aeromonas veronii strain, Pseudomonas mossellii, Stenotrophomas maltophilia, Aeromonas caviae, Pseudomonas peli, Pseudomonas sediminis, Phyllobacterium myrsinacearum, Pseudomonas nitroreducens.

[0183] In this context, said bacterium may be isolated from the microbiota of a zebrafish.

[0184] According to a particular embodiment, at least one bacterial strain of a probiotic composition of the invention, is from the group consisting of: a Chryseobacterium massiliae strain identified by Accession Number No. I-5479 deposited at the CNCM on Jan. 24, 2020, and a Flavobacterium sp. strain identified by Accession Number No. I-5481 deposited at the CNCM on Jan. 24, 2020, and variants thereof wherein one or more virulence factor coding gene(s) and/or antibiotic resistance genes is(are) deleted or inactivated.

[0185] According to a particular embodiment, at least one bacterial strain of a probiotic composition of the invention, is from the group consisting of: a Chryseobacterium massiliae strain comprising or consisting essentially of, or consisting of the genome of SEQ ID NO:2, and a Flavobacterium sp. strain comprising or consisting essentially of or consisting of the geneome of SEQ ID NO:1, and variants thereof wherein one or more virulence factor coding gene(s) and/or antibiotic resistance genes is(are) deleted or inactivated.

[0186] Those probiotic composition of the invention as described in any one of the embodiments described herein, in particular in the preceding paragraphs concerning probiotic compositions, can be used for the purpose detailed in any embodiment described in the present description.

[0187] The invention also relates to a method of manufacturing a composition, formulation, food product (liquid or dry), or kit containing the active ingredient(s) described herein, according to any embodiment herein disclosed.

[0188] The invention also relates to a method of using any of the active ingredient(s) described herein, according to any embodiment herein disclosed including variants, for producing or manufacturing a composition, formulation, food product (liquid or dry), or kit suitable for being administered to a host, in particular a fish, in need thereof. The composition, formulation, food product (liquid or dry), or kit may be used for probiotic or prophylactic purpose, or against a disease in the host, according to any embodiment described herein.

[0189] The invention also relates to the use any of the active ingredient(s) described herein, according to any embodiment herein disclosed including variants, for producing or manufacturing a composition, formulation, food product (liquid or dry), or kit suitable for being administered to a host, in particular a fish, in need thereof.

[0190] The invention also relates to the use any of the active ingredient(s) described herein, according to any embodiment herein disclosed including variants, for administration to a host, in particular a fish, in need thereof. Administration may be intended for probiotic or prophylactic purpose, or against a disease in the host, according to any embodiment described herein.

[0191] The invention also relates to a method to identify bacterial strain(s) that are probiotic against a pathogen infection, comprising the steps of:
[0192] a) Providing a germ-free trout model that is susceptible of being infected, with adverse effect on its health condition, by at least one determined pathogen, the latter of which does not infect a conventional trout with adverse effect on its health condition,
[0193] b) Determining the microbiota, especially the culturable microbiota, of the said conventional trout of step a) and optionally identifying the most represented bacterial strains of said microbiota, further optionally after isolating the said most represented bacterial strains of said microbiota (so that identification is possible).
[0194] c) Exposing the germ-free trout model to the at least one determined pathogen of step a) after reconventionalization of the germ-free trout model through inoculation of the germ-free trout with either the microbiota determined in b) or with the most represented bacterial strain(s) of said microbiota identified in b), when identified,
[0195] d) Concluding about the probiotic effect of the microbiota or the most represented bacterial strains thereof, inoculated to the reconventionalized germ-free trout model.

[0196] With regards to step a), the germ-free trout model may consist in trout larvae. According to a particular embodiment, the germ-free trout model is a rainbow trout. Present description details how inventors obtained such a new model, for the first time.

[0197] According to a more particular embodiment, step a) may alternatively encompass identifying a pathogen that infect, in particular kills, a germ-free trout model, but does not infect, in particular kills, a conventional trout.

[0198] The fact that the provided pathogen kills the used germ-free trout model is a possibility to increase the level of stringency of the above-recited method to identify bacterial strain(s). Indeed, with such a criteria the method provides more relevant hits (i.e., can be termed a “high throughput” method). Nevertheless, the skilled person can appreciate that observation of symptoms of lesser gravity than the death of the fish does not prevent the method of being successfully carried out (i.e. by observing symptoms of infection in the fish and their possible alleviation in step c)), albeit in a less efficient way (lower throughput, but hits still identified).

[0199] Particular examples detailing how steps a) to d) can be achieved are thoroughly exemplified in the experimental section of the present description. It will be understood that the method to identify bacterial strain(s) described herein can be applied to a great number of distinct pathogens (in step a)), and a large number of distinct microbiota (which may partly depend upon the environment), depending on the circumstances of the experiments. The skilled person can readily determine the circumstances of the experiments, guidance is provided in the experimental section hereafter.

[0200] By “reconventionalization”, it meant inoculating a microbiota of relevance to the host who lacks said microbiota. Comprehensive examples, and guidance that can be derived therefrom, are provided herein.

[0201] Conclusion in step d) can be made by observing the biological effect obtained after the challenge of step c), on the reconventionalized trout model. Comprehensive examples, and guidance that can be derived therefrom, are provided herein.

[0202] The term “comprising” as used herein, which is synonymous with “including” or “containing”, is open-ended, and does not exclude additional, unrecited element(s), ingredient(s) or method step(s), whereas the term “consisting of” is a closed term, which excludes any additional element, step, or ingredient which is not explicitly recited.

[0203] The term “essentially consisting of” is a partially open term, which does not exclude additional, unrecited element(s), step(s), or ingredient(s), as long as these additional element(s), step(s) or ingredient(s) do not materially affect the basic and novel properties of the application.

[0204] The term “comprising” (or “comprise(s)”) hence includes the term “consisting of” (“consist(s) of”), as well as the term “essentially consisting of” (“essentially consist(s) of”). Accordingly, the term “comprising” (or “comprise(s)”) is, in the present application, meant as more particularly encompassing the term “consisting of” (“consist(s) of”), and the term “essentially consisting of” (“essentially consist(s) of”).

[0205] In an attempt to help the reader of the present application, the description has been separated in various paragraphs or sections. These separations should not be considered as disconnecting the substance of a paragraph or section from the substance of another paragraph or section. To the contrary, the present description encompasses all the combinations of the various sections, paragraphs and sentences that can be contemplated.

[0206] Each of the relevant disclosures of all references cited herein is specifically incorporated by reference.

[0207] The features described here-above and other features of the invention will be apparent when reading the examples and the figures, which illustrate the experiments conducted by the inventors, in complement to the features and definitions given in the present description. The following examples are offered by way of illustration. The examples are however not limitative with respect to the described invention.

### LEGEND OF THE FIGURES

[0208] FIG. 1. Flavobacterium columnare kills germ-free but not conventional zebrafish. 6 dpf GF or Conv zebrafish larvae were exposed to different doses of F. columnare^{ALG} by bath immersion and transferred after 3 h into sterile water. Mean survival is represented by a thick horizontal bar with standard deviation. For each condition, n=12 zebrafish larvae. Larvae mortality rate was monitored daily and surviving fish were euthanized at day 10 post infection. Statistics correspond to unpaired, non-parametric Mann-Whitney test comparing all conditions to non-infected GF (left) or Conv (right). ****: p<0.0001; absence of *: non-significant. Blue (grey in black and white version) mean bars correspond to non-exposed larvae and red (light grey in black and white version)mean bars correspond to larvae exposed to F. columnare.

[0209] FIG. 2. Screen for F. columnare strains killing germ-free zebrafish. A. Survival of GF zebrafish larvae exposed to a collection of 28 strains of F. columnare. B. Survival of GF and Conv zebrafish larvae exposed to the 7 most virulent F. columnare strains. Zebrafish larvae were infected at 6 dpf by immersion for 3 h with 5.10² cfu/mL. Mean survival is represented by a thick horizontal bar with standard deviation. For each condition, n=12 zebrafish larvae. Larvae mortality rate was monitored daily and surviving fish were euthanized at day 10 post infection. Statistics correspond to unpaired, non-parametric Mann-Whitney test comparing all conditions to non-infected GF. ****: p<0.0001; ***: p<0.001: *: p<0.005 *: p<0.05; No star: non-significant. Blue/grey mean bars correspond to non-infected larvae and red (light grey in black and white version) mean bars correspond to infected larvae.

[0210] FIG. 3. Conventional larvae from 4 different zebrafish facilities are also protected against F. columnare infection. Zebrafish AB line eggs from 4 different zebrafish facilities were collected: Facility 1—Hopital Robert Debré academic facility, Paris, France; Facility 2 and 3—two academic facilities at University Paris 6, Paris, France; Facility 4—commercial Amagen facility in Gif-sur-Yvette, France. 6 dpf GF or Conv zebrafish larvae from each facility were exposed to F. columnare^{ALG} by bath immersion and transferred after 3 hours to sterile water. . Mean survival is represented by a thick horizontal bar with standard deviation. For each condition, n=12 zebrafish larvae. Blue (grey in black and white version) mean bars correspond to non-infected larvae and red (light grey in black and white version) mean bars correspond to infected larvae. Larvae mortality rate was monitored daily and surviving fish were euthanized at day 10 post infection. Indicated statistics correspond to unpaired, non-parametric Mann-Whitney test. ****: p<0.0001; absence of *: non-significant.

[0211] FIG. 4. Reconventionalization of germ-free zebrafish larvae confers protection against F. columnare infection.

[0212] Resistance to F. columnare^{ALG} of GF and Conv zebrafish larvae placed in contact with fish facility tank water or mashed non-sterile eggs at 0 (sterilization day) or 4 dpf (hatching day). F. columnare^{ALG} inoculum doses=5×10⁵ cfu/mL. Mean survival is represented by a thick horizontal bar with standard deviation. For each condition, n=12 zebrafish larvae. Larvae mortality rate was monitored daily and surviving fish were euthanized at day 10 post infection. Statistics correspond to unpaired, non-parametric Mann-Whitney test comparing all conditions to non-infected non-infected GF ****: p<0.0001; absence of *: non-significant. Blue (grey in black and white version) mean bars correspond to non-infected larvae and red (light grey in black and white version) mean bars correspond to infected larvae.

[0213] FIG. 5. A mix of the 10 culturable bacteria constituting the core zebrafish larvae microbiota confers protection against F. columnare infection. The 10 culturable strains identified as the core conventional microbiota were added as an equivalent concentration of 5×10⁵ cfu/mL mix to 4 dpf larvae followed by infection challenge at 6 dpf. Mean survival is represented by a thick horizontal bar with standard deviation. For each condition, n=12 zebrafish larvae. Larvae mortality rate was monitored daily and surviving fish were euthanized at day 10 post infection. Indicated statistics correspond to unpaired, non-parametric Mann-Whitney test. ****: p<0.0001; absence of *: non-significant. Blue (grey in black and white version) mean bars correspond to non-infected larvae and red (light grey in black and white version) mean bars correspond to infected larvae.

[0214] FIG. 6. Dynamics of bacterial community establishment in reconventionalized zebrafish larvae. Relative abundances of the 10 species composing the identified Mix10 core protective zebrafish microbiota at different time points using 16S rDNA gene amplicon sequencing of pools of 10 larvae. Left bar represents the relative abundance of microbiota species of conventional zebrafish larvae on hatching day (4 dpf). For Re-Conv Mix10 populations, Tetrahymena-fed GF larvae were incubated with an equiratio combination of the 10 species (5×10⁵ cfu/mL each) composing the microbiota core at 4 dpf.

[0215] FIG. 7. Effect of antibiotic treatment on zebrafish survival. GF and Conv zebrafish larvae were exposed to antibiotic treatment for 16 hours at 4 dpf. Antibiotics were then washed off and the zebrafish larvae were infected with F. columnare^{ALG}. Different concentrations of penicillin/streptomycin or kanamycin were used to identify a non-toxic antibiotic treatment causing microbiota dysbiosis. Penicillin/streptomycin dose 1=250 μg/mL; dose 2=15,6 μg/mL; kanamycin dose 1=200 μg/mL; dose 2=50 μg/mL; dose 3=25 μg/mL. Mean survival is represented by a thick horizontal bar with standard deviation. For each condition, n=12 zebrafish larvae. Blue (grey in black and white version) mean bars correspond to non-infected larvae and red (light grey in black and white version) mean bars correspond to infected larvae. Larvae mortality rate was monitored daily and surviving fish were euthanized at day 10 post infection. Indicated statistics correspond to unpaired, non-parametric Mann-Whitney test. ****: p<0.0001; ***: p<0.001; **: p<0.005 *: p<0.05; absence of *: non-significant.

[0216] FIG. 8. Analysis of protection against F. columnare infection after antibiotic dysbiosis. A: Response of zebrafish larvae to F. columnare^{ALG} infection after antibiotic-induced dysbiosis with a diagram showing timing and treatments of the experiment. B: A 24 h period after antibiotic treatment allows the recovery of protection in kanamycin-treated zebrafish larvae with a diagram showing timing and treatments. Mean survival is represented by a thick horizontal bar with standard deviation. For each condition, n=12 zebrafish larvae. Blue (grey in black and white version) mean bars correspond to non-infected larvae and red (light grey in black and white version) mean bars correspond to infected larvae. Larvae mortality rate was monitored daily and surviving fish were euthanized at day 10 post infection. Indicated statistics correspond to unpaired, non-parametric Mann-Whitney test. ****: p<0.0001; absence of *: non-significant. C: Community recovery profile with streptomycin/penicillin treatment. D: Community recovery profile with kanamycin treatment. Pools of 10 larvae were collected for 16S rDNA sequencing.

[0217] FIG. 9. Protection of zebrafish against F. columnare reconventionalized with individual or mixed bacterial strains isolated from zebrafish larvae. A: Determination of the level of protection provided by each of the 10 bacterial species composing the core protective zebrafish microbiota. Bacteria were added individually to the water on hatching day (dose 5×10⁵ cfu/ml). B: Level of protection provided by different amount of C. massiliae and Mix9. Mix9 only protected at the highest inoculum doses. Mean survival is represented by a thick horizontal bar with standard deviation. For each condition, n=12 zebrafish larvae. Blue (grey in black and white version) mean bars correspond to non-infected larvae and red (light grey in black and white version) mean bars correspond to infected larvae. Larvae mortality rate was monitored daily and surviving fish were euthanized at day 10 post infection. Indicated statistics correspond to unpaired, non-parametric Mann-Whitney test. ****: p<0.0001; absence of *: non-significant.

[0218] FIG. 10. Combinations of 8 species from the protective Mix9 do not protect against F. columnare infections. A: Zebrafish larvae survival to F. columnare^{ALG} infection at 6 dpf after reconventionalization with different possible mixes including 8 species of the Mix9 consortium. Mix10=Re-ConvMix¹⁰. Mix9=Re-Conv^{Mix9}, Mix8=Re-Conv^{Mix8}. B: table showing different combinations used for the reconventionalization at 4 dpf. C: Zebrafish larvae survival to F. columnare^{ALG} infection at 6 dpf after reconventionalization with eight different combinations of the non-protective Mix8a were tested, in which the quantity of 1 of the 8 species was doubled in each combination (indicated in yellow in D). D: table showing different combinations used for the reconventionalization at 4 dpf. Mix10=Re-ConvMix¹⁰. Mix9=Re-Conv^{Mix9}. Mix8=Re-Conv^{Mix8}. A and C: Mean survival is represented by a thick horizontal bar with standard deviation. For each condition, n=12 zebrafish larvae. Blue (grey in black and white version) mean bars correspond to non-infected larvae and red (light grey in black and white version) mean bars correspond to infected larvae. Larvae mortality rate was monitored daily and surviving fish were euthanized at day 10 post infection. Indicated statistics correspond to unpaired, non-parametric Mann-Whitney test. ****: p<0.0001; absence of *: non-significant.

[0219] FIG. 11. Zebrafish immune response to F.columnare infection. A-C: qRT-PCR analysis of host gene expression, 18 hours after exposure to F. columnare, in larvae reconventionalized with indicated bacteria or bacterial mixes: each point corresponds to an individual larva. Expression of il10 (A), il1b (B), and il22 (C), by wild-type AB zebrafish; D: Comparison of the survival of myd88−/− and background-matched myd88+/+ zebrafish after reconventionalyzation and exposure to F. columnare^{ALG}. Mean survival is represented by a thick horizontal bar with standard deviation. For each condition, n=12 zebrafish larvae. Larvae mortality rate was monitored daily and surviving fish were euthanized at day 10 post infection. A-D: Blue (grey in black and white version) bars correspond to non-infected larvae and red (light grey in black and white version) bars correspond to infected zebrafish. Indicated statistics correspond to unpaired, non-parametric Mann-Whitney test. ****: p<0.0001; ***: p<0.001; **: p<0.005 *: p<0.05; absence of *: non-significant.

[0220] FIG. 12. Expression of il1b in WT and myd88^{-/-} zebrafish mutants reconventionalized with indicated various bacteria or bacterial mixes, qRT-PCR analysis of il1b gene expression were performed 18 hours after exposure to F. columnare^{ALG}. Each point corresponds to an individual larva. Blue (grey in black and white version) mean bars correspond to non-infected larvae and red (light grey in black and white version) mean bars correspond to infected larvae. Larvae mortality rate was monitored daily and surviving fish were euthanized at day 10 post infection. Indicated statistics correspond to unpaired, non-parametric Mann-Whitney test. ****. p<0.0001; *: p<0.001; *: p<0.005 *: p<0.05; absence of *: non-significant.

[0221] Mean survival is represented by a thick horizontal bar. Blue (grey in black and white version) bars correspond to non-infected larvae and red (light grey in black and white version) bars correspond to infected zebrafish.

[0222] FIG. 13. Intestine of infected germ-free zebrafish displays severe disorganization. Germ-free, conventional and reconventionalized zebrafish larvae. Reconventionalized zebrafish were inoculated at 4 dpf with Mix9 or C. massiliae. A: Representative picture of intestines of non-infected larvae. Fish were fixed for histology analysis or electron microscopy at 7 dpf. Left: Giemsa coloration L=intestinal lumen Right. Transmission electron microscopy. B: Representative picture of intestines of infected larvae exposed at 7 dpf to F. columnare^{ALG}. Toluidine blue staining of Epon-embedded zebrafish larvae for Light microscopy (left) or Transmission electron microscopy at 7 dpf (right).

[0223] FIG. 14. F. columnare infection larvae requires food ingestion. GF zebrafish larvae were fed with sterile T. thermophila (GF+Tetra) or sterile fish food powder (GF+powder) or were not fed before F.columnare^{ALG} infection. Whereas, fed larvae were sensitive to F.columnare^{ALG} infection, un-fed GF larvae did not die after fish pathogen infection. Mean survival is represented by a thick horizontal bar with standard deviation. For each condition, n=12 zebrafish larvae. Blue (grey in black and white version) mean bars correspond to non-infected larvae and red (light grey in black and white version) mean bars correspond to infected larvae. Larvae mortality rate was monitored daily and surviving fish were euthanized at day 10 post infection. Indicated statistics correspond to unpaired, non-parametric Mann-Whitney test. ****: p<0.0001; ***: p<0.001: *: p<0.005 *: p<0.05; absence of *: non-significant.

[0224] FIG. 15. Pre-exposure to C. massiliae protects larval and adult zebrafish against F. columnare infection

[0225] A: Zebrafish larvae were inoculated at 4 dpf with 5×10⁵ cfu/ml of C. massiliae for 48 h before infection at 6 dpf with virulent F. columnare strains. B: Survival of adult zebrafish with or without pre-exposure to C. massiliae (2×10⁶ cfu/mL for 48 h) followed by exposure to F. columnare^{ALG} (5×10⁶ cfu/mL for 1 h) Mean survival is represented by a thick horizontal bar with standard deviation. For each condition, n=12 zebrafish larvae or adult. Zebrafish mortality rate was monitored daily and surviving fish were euthanized at day 10 post infection. Blue (grey in black and white version) bars correspond to non-infected larvae and red (light grey in black and white version) bars correspond to infected zebrafish. Indicated statistics correspond to unpaired, non-parametric Mann-Whitney test. ****: p<0.0001; **: p<0.005 *; absence of *: non-significant.

[0226] FIG. 16. Protocol used in this study to raise and infect or re-conventionalized germ-free trout larvae

[0227] FIG. 17. Protocol used in this study to raise and infect or re-conventionalized germ-free trout larvae. After fertilization, eggs are sterilized (−5 dph) and kept in sterile, autoclaved mineral water at 16° C. in Petri dish until hatching. Once hatched, rainbow trout larvae are transferred to vented cap cell culture flasks, where they are kept all the experiment. Larvae are fed every 2 days with sterile powder food after 21 dph until the end of the experience; water was renewed 30 minutes after animals feeding. To test the protective effect of potentially probiotic strains, larvae were re-conventionalized by one or several commensal bacteria diluted in water at 22 dph. Pathogenic bacteria are added to the water at 24 dph for 24 h and then larvae are washed with fresh sterile water.

[0228] FIG. 18. Growth performance of rainbow trout larvae raised under germ-free and conventional conditions. Conventional and germ-free fish body size (A) and body weight (B) were measured at 35 dph (n=6).

[0229] FIG. 19. Anatomical comparison of conventional and GF rainbow trout larvae. Whole-mount were analyzed by optical projection tomography after fish clearing based on immunolabeling-enabled 3D imaging of solvent-cleared organs procedure (iDISCO+). Lateral views of 21 dph imaged conventional (A, B, C and D) and GF (E, F, G and H) rainbow trout larvae. Brain (A and F), spleen (B and G), gut (C and H), gills (D and I), and head kidney (E and J). Images representative of two different fishes per condition.

[0230] FIG. 20. Anatomical comparison of the gut of conventional and GF rainbow trout larvae. Whole-mount were analyzed by optical projection tomography after fish clearing based on immunolabeling-enabled 3D imaging of solvent-cleared organs procedure (iDISCO+). Lateral views of 21 dph imaged conventional (A and B) and GF (C and D) rainbow trout larvae. Mid-gut (A and C), and posterior gut (B and D). Images representative of two different fishes per condition.

[0231] FIG. 21. Survival of GF and conventional rainbow trout larvae infected with different pathogens. A) GF larvae survival exposed by bath to F. psychrophilum strain THCO2-90, F. columnare strain Fc7, L. garvieae, V. anguillarum and Y. ruckeri strain JIP 27/88. B) F. columnare strain Fc7 kills germ-free but not conventional rainbow trout. Mean and SD plot representing average day post-infection at which infected fish die. For each condition n=12 larvae. All surviving fish were euthanized at day 10 post-infection. Asterisks indicate significant difference from non-infected population (**** p<0.0001).

[0232] FIG. 22. Survival of re-conventionalized trout larvae against F. columnare Fc7 infection. A: GF trout larvae exposed to water used to raise conventional fish at 21 dph show similar survival to F. columnare infection than conventional trout larvae. B) The 11 species identified from conventional fish microbiota were added to rainbow trout larvae at 22 dph, followed by F. columnare infection at 24 dph. This bacterial mixture is able to protect re-conventionalized larvae from infection. For each condition n=12 larvae. All surviving fish were euthanized at day 10 after infection(**** p<0.0001).

[0233] FIG. 23. Protection of GF trout larvae against F. columnare infection by individual species isolated from the Conv rainbow trout microbiota.

[0234] A: The 11 species isolated from Conv fish microbiota (Table 1) were added individually to rainbow trout larvae at 22 dph, followed by F. columnare Fc7 infection at 24 dph. From the 11 different strains, only Flavobacterium sp. strain 4466 protected re-conventionalized larvae from infection. B: Mix11, Mix10 (mix of all identified strain with the exception of Flavobacterium sp. strain 4466), were added to rainbow trout larvae at 22 dph, followed by F. columnare infection at 24 dph. Mix11 protected re-conventionalized larvae from infection, whereas Mix10 did not. For each condition n=10 larvae. All surviving fish were euthanized at day 10 after infection. C: CFU/mL recovered from dissected intestines from GF fish exposed to F. columnare Fc7, Flavobacterium sp. strain 4466 or both. 24 hours post-infection. (**** p<0.0001).

[0235] FIG. 24. Chryseobacterium sp. (C. massiliae) provides full trout protection against F. columnare infection. GF trout larvae survival exposed to Chryseobacterium sp. 48 h before infection with F. columnare strains Fc7, IA-S-4, Ms-Fc-4 and ALG-00-530. F. columnare kills germ-free but not those trout previously reconventionalized with Chryseobacterium sp. Mean and SD plot representing average day post-infection at which infected fish die. For each condition n=12 larvae. All surviving fish were euthanized at day 10. Asterisks indicate significant difference from non-infected population (**** p<0.0001; ** p<0.01).

[0236] FIG. 25. Survival of GF and Conv rainbow trout larvae infected with different fish pathogens. Kaplan-Meier graph of GF larvae survival after bath exposure to F. psychrophilum strain THCO2-90, F. columnare strain Fc7, L. garvieae strain JIP 28/99. V. anguillarum strain 1669 and Y. ruckeri strain JIP 27/88. Mean and SD plot representing average survival percentage of fish for 10 days after exposition to different pathogenic microorganisms. For each condition n=10 larvae. All surviving fish were euthanized at day 10 post-infection. Asterisks indicate significant difference from non-infected population (** p<0.01; *** p<0.001; **** p<0.0001).

[0237] FIG. 26. Survival of re-conventionalized trout larvae against F. columnare Fc7 infection. Kaplan-Meier graph of GF larvae survival after bath exposure to F. columnare strain Fc7, A: F. columnare strain Fc7 kills GF but not Conv rainbow trout. B: GF trout larvae exposed to water used to raise Conv fish at 22 dph show similar survival rates to F. columnare infection than Conv trout larvae. C: The 11 strains identified from Conv fish microbiota were added to rainbow trout larvae at 22 dph, followed by F. columnare infection at 24 dph. This bacterial mixture is able to protect re-conventionalized larvae from infection. Mean and SD plot representing average survival percentage of fish for 10 days after exposition to different pathogenic microorganisms. For each condition n=10 larvae. All surviving fish were euthanized at day 10 after infection. Asterisks indicate significant difference from non-infected population (**** p<0.0001).

[0238] FIG. 27. Histological comparison of the posterior gut of infected and non-infected Conv and GF rainbow trout larvae. A: Representative images of intestines of non-infected GF and Conv trout larvae. B: Representative images of intestines of infected GF and Conv larvae exposed to F. columnare strain Fc7. Fish were fixed for histology analysis at 1 day post-infection (dpi). C: Average Goblet cells number per microvilli of posterior gut. Bars represent means±SD per villi of the same area of posterior gut of 3 fish per condition. Alcian blue and PAS combined staining of paraffin-embedded rainbow trout larvae for light microscopy. Images and quantification data are representative of three different fish per condition.

[0239] FIG. 28. Representative images of in vitro growth-inhibition activity of Flavobacterium sp. strain 4466 against different virulent F. columnare strains. A: lack of F. columnare Fc7 growth-inhibition after adding 5 μl of Flavobacterium sp. culture supernatant. B: Halo of F. columnare FC7 growth inhibition surrounding Flavobacterium sp. colony on a F. columnare strain Fc7 overlay. C: Halo of growth inhibition of F. columnare ALG-00-530, IA-S-4, and Ms-Fc-4. The agar overlay technique was performed by spreading F. columnare bacterial suspension on soft-agar solution over TYES agar, and then spotting 5 μl of an overnight culture of Flavobacterium sp. strain 4466. Incubation was performed at 28ºC for 24 h. This experiment was performed in triplicate.

[0240] FIG. 29. Phylogenetic tree illustrating the relationship between Flavobacterium sp. strain 4466 and the closest 15 Flavobacterium species based on ANI analysis. The tree was constructed with RAxML (version 8.2.8) by using the 400 most conserved proteins across the proteomes of each strain. Bootstrap support values are indicated in the nodes.

### EXAMPLES

### Results

[0241] Flavobacterium columnare Kills Germ-Free but not Conventional Zebrafish

[0242] To investigate microbiota-based resistance to infection in zebrafish, we compared the sensitivity of germ-free (GF) and conventional (Conv) zebrafish larvae to F. columnare, an important fish pathogen previously shown to infect and kill adult zebrafish [33, 34]. We used bath immersion to expose GF and Conv zebrafish larvae at 6 days post fertilization (dpf), to a collection of 28 F. columnare strains, belonging to four different genomovars for 3 h at 5.10⁵ colony forming unit (cfu)/mL. Daily monitoring showed that 16 out of 28 F. columnare strains killed GF larvae in less than 48 h (FIG. 2A), whereas Conv larvae survived exposure to all tested virulent F. columnare strains (FIG. 2B). Exposure to the highly virulent strain ALG-00-530 (hereafter F. columnare^{ALG}) also showed that GF mortality was rapid (1 day) and dose-dependent and that Conv zebrafish survived all but the highest dose (10⁷ cfu/mL) (FIG. 1). Similar survival of infected Conv larvae was obtained with zebrafish AB strain eggs obtained from 4 different zebrafish facilities (FIG. 3), suggesting that conventional zebrafish microbiota could provide protection against F. columnare infection.

Ten Culturable Bacterial Strains are Sufficient to Protect Against F. columnare Infection

[0243] In our rearing conditions, the conventional larval microbiota is acquired after hatching from microorganisms present on the egg chorion and in fish facility water. To test the hypothesis that microorganisms associated with conventional eggs provided protection against F. columnare^{ALG}, we exposed sterilized eggs to either fish facility tank water or to mashed non-sterilized conventional eggs at 0 or 4 dpf (before or after hatching, respectively). In both cases, these re-conventionalized (re-Conv) zebrafish survived F. columnare^{ALG} infection as well as Conv zebrafish (FIG. 2). To determine the composition of conventional zebrafish microbiota, we generated a clone library and sequenced the 16S rDNA gene content of homogenate pools of 10 Conv zebrafish larvae aged 4, 6 and 11 dpf, exposed or not to F. columnare^{ALG}, sampled over 3 months from different batches of larvae. We identified 13 predominant OTUs, 10 of which were identified in all experiments (Table 1). Moreover, deep-sequencing of the 16S rDNA V3-V4 region of gDNA retrieved from larvae originating from the other four zebrafish facilities described above revealed that most of these 10 OTUs were also detected in Conv larvae (Table 2).

TABLE 2
Percent abundance of OTUs detected by Illumina 16S rDNA sequencing for C. massiliae, F. columnare
and other strains isolated at Institut Pasteur facility as “core” microbiota in facilities F1-F4.

| | F1 | | | | F2 | | | | F3 | | | | F4 | | | |
|---|---|---|---|---|---|---|---|---|---|---|---|---|---|---|---|---|
| | | | +F. | | | | +F. | | | | +F. | | | | + F. | |
| | uninfected | | columnare | | uninfected | | columnare | | uninfected | | columnare | | uninfected | | columnare | |
| | 6 | 11 | 6 | 11 | 6 | 11 | 6 | 11 | 6 | 11 | 6 | 11 | 6 | 11 | 6 | 11 |
| | dpf | dpf | dpf | dpf | dpf | dpf | dpf | dpf | dpf | dpf | dpf | dpf | dpf | dpf | dpf | dpf |
| Aeromonas | | | | | | | | | 0.01 | | 0.01 | | | | | |
| hydrophila | | | | | | | | | | | | | | | | |
| Aeromonas spp. | | | | | 0.04 | 0.09 | 15.32 | 8.93 | | | 0.01 | | 0.70 | | | |
| Chryseobacterium | 0.64 | 0.03 | 1.07 | | 43.13 | 13.45 | 9.03 | 11.52 | | | | | 36.08 | 1.71 | 53.06 | 1.68 |
| massiliae | | | | | | | | | | | | | | | | |
| Chryseobacterium | | | | | 0.02 | | | | | | | | <0.01 | | <0.01 | |
| spp. | | | | | | | | | | | | | | | | |
| Flavobacterium | | | 0.66 | | | | 0.08 | | 0.01 | | 0.85 | | | | 3.97 | |
| columnare | | | | | | | | | | | | | | | | |
| Flavobacterium | 0.21 | 8.42 | 0.25 | 8.75 | | 0.10 | | | 66.61 | 31.36 | 60.68 | 21.55 | | | | |
| spp. | | | | | | | | | | | | | | | | |
| Phyllobacterium | | | | | | | | | | | | | | | | |
| sp. | | | | | | | | | | | | | | | | |
| Pseudomonas | | | | | 0.01 | 0.05 | | 0.01 | 1.16 | 0.03 | 2.25 | 19.49 | | | <0.01 | |
| (pseudo)alcaligenes | | | | | | | | | | | | | | | | |
| Pseudomonas | | 5.68 | | 0.10 | | | | | | <0.01 | | | 4.03 | 6.72 | 15.06 | 28.75 |
| mossellii | | | | | | | | | | | | | | | | |
| Pseudomonas peli | | | | | 6.98 | 0.10 | 4.24 | 0.07 | 6.69 | 1.27 | 18.39 | 3.17 | | | | |
| Pseudomonas spp. | 15.64 | 1.67 | 14.77 | 14.70 | 0.08 | 0.12 | 0.14 | 0.03 | 0.31 | | 0.90 | 5.67 | 0.29 | 0.60 | 0.65 | 1.28 |
| Stenotrophomonas | 0.21 | | | | | | | | | | | | | | | |
| maltophilia | | | | | | | | | | | | | | | | |
| Stenotrophomonas | 0.32 | 0.06 | 0.25 | | | 0.02 | 0.01 | | | | | 0.05 | 0.01 | | | |
| sp. | | | | | | | | | | | | | | | | |

| | F1 | F1 | F2 | F2 | F3 | F3 | F4 | F4 | our facilty | our facilty |
|---|---|---|---|---|---|---|---|---|---|---|
| | conv | conv | conv | conv | conv | conv | conv | conv | conv | conv |
| | 0 dpi | 5 dpi | 0 dpi | 5 dpi | 0 dpi | 5 dpi | 0 dpi | 5 dpi | 0 dpi | 5 dpi |
| Aeromonas aquatica | 0.56 | 0.33 | 0.98 | 13.79 | 1.97 | 0.12 | 36.18 | 0.79 | 3.46 | 14.53 |
| Aeromonas veronii 1 | 9.30 | 3.15 | 0.62 | 1.38 | 0.50 | 1.26 | 1.17 | 45.27 | 73.18 | 4.17 |
| Aeromonas veronii 2 | 0.07 | 0.04 | 0.00 | 0.01 | 0.00 | 0.00 | 0.00 | 0.02 | 0.00 | 0.00 |
| Chryseobacterium massilliae | 0.73 | 0.11 | 49.13 | 17.15 | 0.01 | 0.00 | 30.62 | 2.72 | 1.47 | 0.89 |
| Phyllobacterium myrsinacearum | 5.00 | 5.16 | 1.70 | 11.05 | 13.78 | 12.56 | 3.10 | 1.39 | 5.63 | 22.55 |
| Pseudomonas alcaliphila | 0.17 | 0.56 | 2.31 | 2.67 | 1.06 | 0.05 | 0.39 | 0.92 | 3.77 | 2.51 |
| Pseudomonas mossellii | 21.83 | 9.26 | 0.02 | 0.18 | 1.70 | 1.13 | 8.67 | 13.38 | 2.14 | 36.58 |
| Pseudomonas nitrireducens | 0.24 | 1.35 | 0.56 | 29.27 | 7.12 | 15.26 | 2.83 | 1.92 | 0.00 | 4.66 |
| Pseudomonas peli | 57.01 | 76.51 | 41.82 | 21.72 | 68.02 | 66.07 | 2.99 | 2.43 | 1.99 | 2.83 |
| Stenotrophomonas mallophila | 4.20 | 3.37 | 2.65 | 2.67 | 5.73 | 3.52 | 14.00 | 31.02 | 8.11 | 11.30 |

[0244] To isolate culturable zebrafish microbiota bacteria, we plated dilutions of homogenized 6 dpf and 11 dpf larvae pools on various growth media and we identified 10 different bacterial morphotypes. Use of 16S-based analysis followed by full genome sequencing identified 10 bacteria corresponding to 10 strains of 9 different species that were also consistently detected by culture-free approaches (Table 1). We then re-conventionalized GF zebrafish at 4 dpf with a mix of all 10 identified culturable bacterial species (hereafter called Mix10), each at a concentration of 5.10$ cfu/mL and we monitored zebrafish survival after exposure to F. columnare^{ALG} at 6 dpf. We showed that zebrafish reconventionalized with the Mix10 (Re-Conv^{Mix10}) displayed strong level of protection against all identified highly virulent F. columnare strains (FIG. 5). These results demonstrated that the Mix10 constitute a core protective bacterial community providing full protection of zebrafish larvae against F. columnare infection.

TABLE 1
The 10 strains composing the core of zebrafish larvae microbiota
Bacterial strains consistently detected at all time points
(4, 6 and 11 dpf) in all experiment runs and constituting the core of
conventional zebrafish larval microbiota and their taxonomic affiliation.

| Bacterial species of the core | | | | |
|---|---|---|---|---|
| zebrafish microbiota | ANI %^{a} | 16S rRNA (%)^{b} | recA (%)^{c} | rpIC (%)^{d} |
| Aeromonas veronii 1 | 96.52 | 98.27 | 97.00 | 99.84 |
| Aeromonas veronii 2 | 96.58 | 99.53 | 98.31 | 99.68 |
| Aeromonas caviae | 97.97 | 99.94 | 98.78 | 99.84 |
| Chryseobacterium massiliae | 95.85 | 99.86 | 96.61 | 99.84 |
| Phyllobacterium myrsinacearum | 98.58 | 99.86 | 99.72 | 100 |
| Pseudomonas sediminis | 96.12 | 99.73 | 97.70 | 99.84 |
| Pseudomonas mossellii | 99.39 | 98.27 | 100 | 99.84 |
| Pseudomonas nitroreducens* | 92.14 | 99.80 | 94.95 | 99.06 |
| Pseudomonas peli* | 88.84 | 99.20 | 91.51 | 95.44 |
| Stenotrophomas maltophilia* | 90.94 | 97.85 | 95.38 | 99.08 |

^{a}Average Nucleotide Identity value
^{b}16S rRNA gene sequence similarity
^{c}recA gene sequence similarity
^{d}rpIC gene sequence similarity
*Species ambiguously identified

Community Dynamics Under Antibiotic Dysbiosis Reveal a Key Contributor to Resistance to F. columnare Infection

[0245] To further analyze the determinants of Mix10 protection against F. columnare^{ALG} infection, we inoculated 4 dpf larvae with an equal-ratio mix of the 10 bacteria (at 5.10⁵ cfu/mL each) and monitored their establishment over 8 hours. We first verified that whole larvae bacterial content was not significantly different from content of dissected intestinal tubes (p=0.99). We then collected pools of 10 larvae immediately after reconventionalization (t₀), 20 min, 2 hours, 4 hours and 8 hours and we used 16S rDNA sequencing to follow bacterial relative abundance. At t₀, all species were present at >4% in the zebrafish, apart from A. veronii strains 1 (0.2%) and 2 (not detected) (FIG. 6). Aeromonas caviae was detected as the most abundant species, followed by Stenotrophomonas maltophilia and Chryseobacterium massiliae, altogether composing 67.5% of the community (FIG. 6). The relative species abundance, possibly reflecting initial colonization ability, was relatively stable for most species during community establishment, with similar species evenness at t₀ (E=0.84) and t₈h (E=0.85). However, whereas both Conv and Re-Conv^{Mix10} larvae were protected against F. columnare^{ALG} infection, the global structure of the reconstituted Mix10 population was different from the conventional one at 4 dpf (FIG. 6). To test the sensitivity to disturbance and the resilience of the protection provided by Mix10 bacterial community, we subjected Re-Conv^{Mix10} zebrafish to non-toxic antibiotic treatment at 4dpf using either 250 μg/mL penicillin/streptomycin combination (all members of the Mix10 bacteria are sensitive to penicillin/streptomycin) or 50 μg/mL kanamycin (affecting all members of the Mix10 bacteria except C. massiliae, P. myrsinacearum and S. maltophilia) (FIG. 7). At 5 dpf, after 16 hours of exposure, antibiotics were washed off and zebrafish were immediately exposed to F. columnare^{ALG}. Both antibiotic treatments resulted in complete loss of the protection against F. columnare^{ALG} infection observed in Re-Conv^{Mix10} (FIG. 8A). We then used the same antibiotic treatments but followed by a 24 h recovery period after washing off the antibiotics at 5 dpf, therefore only performing the infection at 6 dpf (FIG. 8B). Whilst Re-Conv^{Mix10} larvae treated with penicillin/streptomycin still showed similar protection to infected GF larvae, kanamycin-treated Re-Conv^{Mix10} zebrafish showed restored protection after 24h recovery and survived similarly to untreated conventionalized fish (FIG. 8B). Sampling and 16S analysis during recovery experiments at different time points showed that bacterial community evenness decreased similarly after antibiotic administration for both treatments (E=0.85 for 4 dpf control, E=0.72 for t₀ kanamycin and E=0.7 for t₀ penicillin/streptomycin), and continued to decrease during recovery (E=0.6 and 0.64 for kanamycin and penicillin/streptomycin treatment after 24h recovery, respectively). Remarkably, although C. massiliae remained similarly detectable immediately after both antibiotic treatments, penicillin/streptomycin treatment led a significant reduction in its relative abundance (FIG. 8C). By contrast, C. massiliae relative abundance rebounded 6h after cessation of kanamycin treatment and was the dominant member of the reconstituted microbiota after 24h recovery period (FIG. 8D), suggesting that the protective effect observed in the kanamycin-treated larvae might be due to the recovery of C. massiliae.

Resistance to F. columnare Infection is Provided by Both Individual- and Community-Level Protection

[0246] To test the potential key role played by C. massiliae in protection against F. columnare^{ALG} infection, we exposed 4 dpf GF zebrafish to C. massiliae only and showed that it conferred individual protection at doses as low as 5.10² cfu/mL (FIG. 9). Interestingly, although none of the 9 other species composing the Mix10 were protective individually (FIG. 9A), their equiratio combination (designated as Mix9) conferred protection to zebrafish, although not at doses lower than 5.10⁴ cfu/mL and not as reproducibly as with C. massiliae (FIG. 9B). To identify which association of species or species combination protected Re-Conv^{Mix9} zebrafish against F. columnare infection, we tested all 9 combinations of 8 species (Mix8), as well as several combinations of 7.6.4 or 3 species and showed no protection (FIG. 10 and Table 3). We then tested whether lack of protection of Mix8 compared to Mix9 could rely on a density effect by doubling the concentration of any of the species within the non-protective Mix8a (FIG. 10B) and showed no protection. These results therefore indicated that microbiota-based protection against F. columnare infection relied on either C. massiliae-dependent membership effect or on a community-dependent effect mediated by the Mix9 consortium.

TABLE 3
Combinations of 3, 4, 6 and 7 of the core zebrafish microbiota species tested for
their ability to protect against infection by F. columnare^{ALG}.
These tested combinations did not include C. massiliae.
None of these tested combinations showed significant protection activity against F. columnare^{ALG}.

Tested 3 species combinations
A. caviae + A. veronii2 + A. veronii1
P. myrsinacearum + P. mosselli + P. nitroreducens
P. peli + P. sediminis + S. maltophilia
A. caviae + A. veronii1 + P. myrsinacearum
A. caviae + A. veronii1 + P. nitroreducens
A. caviae + P. myrsinacearum + P. nitroreducens
A. caviae + P. nitroreducens + P. sediminis
A. caviae + P. mosselli + P. peli
A. caviae + P. peli + S. maltophilia
A. caviae + P. mosselli + P. nitroreducens
A. caviae + A. veronii2 + P. myrsinacearum
A. caviae + P. myrsinacearum + S. maltophilia
A. veronii2 + P. mosselli + P. peli
A. veronii2 + P. peli + S. maltophilia
A. veronii2 + P. myrsinacearum + P. nitroreducens
A. veronii2 + P. peli +S. maltophilia
A. veronii2 + P. nitroreducens + P. sediminis
A. veronii1 + P. myrsinacearum + P. mosselli
A. veronii1 + P. mosselli + P. peli
A. veronii1 + P. nitroreducens + S. maltophilia
A. veronii1 + P. myrsinacearum + P. peli
A. veronii1 + P. myrsmacearum + S. maltophilia
P. myrsinacearum + P. nitroreducens + P. sediminis
P. myrsinacearum + P. peli + S. maltophilia
P. mosselli + P. peli + S. maltophilia
A. caviae + P. nitroreducens + S. maltophilia
A. veronii2 + A. veronii1 + P. sediminis
A. veronii2 + P. mosselli + P. peli
A. caviae + P. peli + P. nitroreducens
Tested 4 species combinations
A. caviae + A. veronii2 + A. veronii1 + C. massiliae
A. caviae + A. veronii2 + A. veronii1 + P. mosselli
C. massiliae + P. myrsinacearum + P. mosselli + P. nitroreducens
C. massiliae + P. peli + P. sediminis + S. maltophilia
A. caviae + A. veronii2 + P. myrsinacearum + P. mosselli
A. caviae + A. veronii2 + P. nitroreducens + P. peli
A. caviae + A. veronii2 + P. sediminis + S. maltophilia
P. myrsinacearum + P. mosselli + P. nitroreducens + P. peli
A. caviae + P. mosselli + P. nitroreducens + P. peli
A. veronii2 + P. mosselli + P. nitroreducens + P. peli
A. veronii2 + P. peli + P. sediminis + S. maltophilia
P. myrsinacearum + P. mosselli + P. sediminis + S. maltophilia
A. caviae + A. veronii2 + P. mosselli + P. sediminis
A. caviae + A. veronii2 + P. nitroreducens + S. maltophilia
A. caviae + A. veronii2 + P. myrsinacearum + P. peli
A. caviae + P. myrsinacearum+ P. nitroreducens + P. sediminis
A. veronii2 + A. veronii1 + P. myrsinacearum + P. mosselli
A. veronii2 + P. myrsinacearum + P. nitroreducens + P. peli
A. veronii2 + P. myrsmacearum + P. sediminis + S. maltophilia
A. veronii2 + P. myrsinacearum + P. peli + S. maltophilia
A. veronii2 + A. veronii1 + P. mosselli + P. nitroreducens
A. veronii2 + A. veronii1 + P. peli + P. sediminis
A. veronii2 + A. veronii1 + P. nitroreducens + S. maltophilia
A. veronii2 + A. veronii1 + P. myrsinacearum + P. sediminis
A. veronii2 + A. veronii1 + P. myrsinacearum + S. maltophilia
A. veronii2 + A. veronii1 + P. mosselli + P. sediminis
A. veronii2 + A. veronii1 + P. nitroreducens + P. peli
A. veronii2 + A. veronii1 + P. mosselli + S. maltophilia
A. veronii1 + P. myrsinacearum + P. mosselli + P. nitroreducens
A. veronii1 + P. myrsinacearum + P. mosselli + P. peli
A. veronii1 + P. myrsinacearum + P. mosselli + P. sediminis
A. veronii1 + P. myrsinacearum + P. mosselli + S. maltophilia
A. veronii1 + P. nitroreducens + P. peli + S. maltophilia
A. veronii1 + P. peli + P. sediminis + S. maltophilia
A. veronii1 + P. mosselli + P. peli + S. maltophilia
A. veronii1 + P. nitroreducens + P. peli + S. maltophilia
P. mosselli + A. caviae + P. peli + P. nitroreducens
A. caviae + P. peli + A. veronii2 + P. nitroreducens
Tested 6 species combinations
A. caviae + P. myrsinacearum + P. nitroreducens + P. peli + P. sediminis + S. maltophilia
A. caviae + A. veronii1 + P. mosselli + P. nitroreducens + P. peli + S. maltophilia
A. veronii2 + A. veronii1 + P. mosselli + P. peli + P. sediminis + S. maltophilia
A. veronii2 + A. veronii1 + P. myrsinacearum + P. nitroreducens + P. sediminis + S. maltophilia
A. veronii2 + P. myrsmacearum + P. mosselli + P. nitroreducens + P. peli + S. maltophilia
A. veronii1 + P. myrsinacearum + P. mosselli + P. nitroreducens + P. peli + P. sediminis
A. veronii1 + P. myrsinacearum + P. mosselli + P. nitroreducens + P. peli + S. maltophilia
A. veronii1 + P. mosselli + P. nitroreducens + P. peli + P. sediminis + S. maltophilia
P. myrsinacearum + P. mosselli + P. nitroreducens + P. peli + P. sediminis + S. maltophilia
S. maltophilia + A. caviae + P. peli + P. sediminis + P. myrsinacearum + P. nitroreducens
Tested 7 species combinations
A. caviae + A. veronii2 + A. veronii1 + P. myrsinacearum + P. mosselli + P. nitroreducens + P. peli
A. caviae + A. veroni2 + A. veronii1 + P. myrsinacearum + P. mosselli + P. nitroreducens + P. sediminis
A. caviae + A. veronii2 + A. veronii1 + P. myrsinacearum + P. mosselli + P. nitroreducens + S. maltophilia
A. caviae + A. veronii2 + A. veronii1 + P. myrsinacearum + P. mosselli + P. peli + P. sediminisa
A. caviae + A. veronii2 + A. veronii1 + P. myrsinacearum + P. mosselli + P. sediminis + S. maltophilia
A. veronii2 + A. veronii1 + P. myrsinacearum + P. mosselli + P. nitroreducens + P. peli + P. sediminis

Pro- and Anti-Inflammatory Cytokine Production do not Contribute to Microbiota-Mediated Protection Against F. columnare^{ALG} Infection.

[0247] To test the contribution of larval zebrafish's innate immune response to resistance to F. columnare infection, we used qRT-PCR to measure cytokine mRNA expression in GF and Conv zebrafish, as well as in larvae reconventionalized with C. massiliae (re-Conv^{Cm}), Mix10 (re-Conv^{Mix10}) or with Mix4 (A. caviae, both A. veronii spp., P. mossellii) as a non-protective control (Table 3), exposed or not to F. columnare^{ALG}. We tested genes encoding IL1β (pro-inflammatory), IL22 (promoting gut repair), and IL10 (anti-inflammatory). While we observed some variation in il10 expression among non-infected reconventionalized larvae, this did not correlate with protection. Furthermore, il10 expression was not modulated by infection in any of the tested conditions (FIG. 11A). By contrast, we observed a strong induction of il1b and il22 in GF zebrafish exposed to F. columnare^{ALG} (FIG. 11BC). This induction, however, was not seen in protected Conv, Re-Conv^{Cm}, Re-Conv^{Mix10} or non-protective Re-Conv^{Mix4} larvae. These observations indicate that the presence of a gut microbiota significantly (down-)modulates the inflammatory response induced by F. columnare infection. However, this effect does not correlate with protection, suggesting that inflammation modulation is not the main mechanism of the microbiota-induced resistance. Considering that Myd88 is a key adaptor downstream of IL-1 and toll-like receptor signaling, we also generated GF and Conv larvae from myd88 null zebrafish mutants and exposed them to F. columnare^{ALG} infection. Remarkably, despite their deficiency in innate immunity, Conv or Re-Conv^{Mix10}, but not GF myd88 mutants, survived F. columnare as well as wild-type zebrafish (FIG. 11D). Moreover, il1b induction by F. columnare infection was observed only in GF larvae and was myd88-independent (FIG. 12). These results are therefore inconsistent with a significant role of cytokine contribution to microbiota-mediated protection against F. columnare infection by modulation of the pathogen-induced inflammatory response.

C. massiliae and Mix9 Protect Zebrafish from Intestinal Damage Upon F. columnare Infection

[0248] Histological analysis of GF larvae fixed 24 h after exposure to F. columnare^{ALG} revealed extensive intestinal damage (FIG. 13A) prior to noticeable signs in other potential target organs such as gills or skin. To test the requirement for gut access in F. columnare^{ALG} infection process, we modified our standard rearing protocol of GF fish, which involves feeding with live germ-free T, thermophila. We found that, if left unfed, GF zebrafish did not die after F. columnare^{ALG} exposure, while feeding with either T. thermophila or another food source such as sterile fish food powder, restored sensitivity to F. columnare^{ALG} infection (FIG. 14), suggesting that successful infection requires feeding and ingestion.

[0249] Histological sections consistently showed severe disorganization of the intestine with blebbing in the microvilli and vacuole formation in F. columnare-infected GF larvae (FIG. 13). In contrast, zebrafish pre-incubated with either C. massiliae or Mix9 consortium at 4 dpf, and then exposed to F. columnare at 6 dpf showed no difference compared to non-infected larvae or conventional infected larvae (FIG. 13), confirming full protection against F. columnare at the intestinal level.

C. massiliae Protects Larvae and Adult Zebrafish Against Virulent F. columnare Strains

[0250] The clear protection provided by C. massiliae against F. columnare infection prompted us to test whether exogenous addition of this bacterium could improve microbiota-based protection towards this widespread fish pathogen. We first showed that zebrafish larvae colonized with C. massiliae were fully protected against all virulent F. columnare strains identified in this study (FIG. 15A). To test whether C. massiliae could also protect adult zebrafish from F. columnare infection, we pre-treated conventional 3-4 month old Conv adult zebrafish with C. massiliae for 48 h before challenging them with a high dose (5×10⁶ cfu/mL) F. columnare^{ALG}. Monitoring of mortality rate showed that pre-treatment with C. massiliae significantly increased (p=0.0084)) the survival rate of adult zebrafish upon F. columnare^{ALG} infection compared to non-treated conventional fish (FIG. 15B). Taken together, these results show that C. massiliae is a putative broad-spectrum probiotic protecting zebrafish against columnaris disease caused by F. columnare.

### Generation of Germ-Free Rainbow Trout Larvae.

[0251] To investigate the potential protection conferred by endogenous or exogenous bacteria against incoming pathogens in microbiologically controlled rainbow trout host (Oncorhynchus mykiss), we first aimed to produce germ-free (GF) trout larvae. For this, we exposed freshly fertilized eggs for 5 h to a previously described cocktail of antibiotics and antifungal [136], and then to 0.005% bleach for 15 min, followed by a 10 min treatment with Romeiod, a iodophore disinfection solution. Germ-free eggs were then kept under sterile conditions in class II hood in a 16° ° C. aqueous solution supplemented with antibiotics. We then sampled 50 μl of rearing water and performed cultured-based and 16S-based PCR tests, assessing for the sterility of the treated eggs 24 h post-treatment (FIG. 16).

[0252] Germ-free eggs hatched spontaneously post-fertilization (dpf), similarly to non-treated conventional (Conv) eggs, indicating that our sterilization protocol did not affect egg viability. On the contrary, we determined that egg sterilization positively affected hatching efficiency with 72±5.54% for treated eggs and 48.6±6.2% for conventional eggs. Once hatched, a maximum of 12 larvae were transferred into 75 cm³ vented-cap cell culture flasks containing fresh sterile water without antibiotics (FIG. 17). Flask water was renewed every 48 h and GF and Conv fish relied on their vitellus reserves until day 21 days post-hatching (dph), after which they were fed with gamma-ray sterilized fish food powder every 48 h, 30 minutes before water renewal (FIG. 17). In the case of GF fish, we sampled 50 μl of fish water before each water change and one larvae every week to performed culture-based and 16S-based PCR sterility tests until the end of the experiment (35 day dph).

### 35 Dph Germ-Free Trout Show Normal Development and Growth Compared to Conventional Larvae.

[0253] To test the consequence of raising GF larvae in sterile conditions, we compared growth performance of Conv and GF larvae reared from the same egg batches and observed no significant differences in standard body length and weight at 35 dph, with 2.33±0.20 cm Vs 2.16±0.11 cm and 0.72±0.21 g vs 0.64±0.19 g for conventional and GF larvae, respectively (FIG. 18).

[0254] Consistently, anatomical comparison of Conv and GF trout by optical projection tomography showed no anatomical difference in organ development between conventional or GF fish at 21 dph, even regarding organs in direct contact with fish microbiota such as gills (FIGS. 19D and 19I) and intestine (FIGS. 19C and 19H; FIG. 20), or potentially influenced by gut-microbiota such as brain (FIGS. 19A and 19F), spleen (FIGS. 19B and 19G) or head kidney (FIGS. 19E and 19J) [139]. These results suggest that the natural microbiota have not a major impact on development and growth at this stage of the rainbow trout life-cycle.

### Identification of Fish Pathogens Killing Germ-Free but not Conventional Trout Larvae

[0255] To identify pathogens able to infect GF rainbow trout larvae by the natural infection route, we tested several trout bacterial pathogens, including Flavobacterium psychrophilum strain THC-O2/90, F. columnare strain Fc7, Lactococcus garvieae, Vibrio anguillarum strain 1669 and Yersinia ruckeri strain JIP27/88. At 24 dph, GF rainbow trout larvae were exposed 24 h in water containing 10⁷ CFU/mL of the tested pathogen. Fish were then washed 3-times by renewing the 90% of the infection bath by fresh sterile water and then kept at 16°C. under sterile conditions. Among all tested pathogens, F. columnare strain Fc7 was the most virulent pathogen, leading to high and reproducible mortality of GF trout within 48 h after exposure (FIG. 21A and FIG. 25). In contrast to GF trout sensitivity to F. columnare, conventional larvae reared from non-sterilized eggs resisted to infection under all tested conditions (FIG. 21B and FIG. 26). Consistently, histology analysis performed at 25 dph (24 h after infection) showed that infected GF fish displayed dissociation of gill epithelium and a severe disorganization of the intestinal region. In contrast, infected conventional rainbow trout larvae exposed to F. columnare showed no difference with non-infected GF or conventional larvae. More precisely, histological analysis performed at 25 dph (24 h post infection) on GF and Conv larvae did not show any sign of intestinal damage (FIG. 27). However, we observed an increase in goblet cells number in infected vs non-infected GF larvae, whereas Conv infected larvae showed the opposite phenotype when compared to non-infected Conv larvae (FIG. 27).

Conventional Rainbow Trout Microbiota Protects Against F. columnare Infection

[0256] Based on the high sensitivity of GF but not conventional rainbow trout to F. columnare Fc7, we hypothesized that observed resistance to infection could be provided by conventional microbiota. To test this, we exposed GF rainbow trout larvae to water used to raised conventional fish at 21 dph, one week before infection challenge by F. columnare Fc7. Re-conventionalized rainbow trout larvae survived to F. columnare equally well than conventional ones, whereas those maintained in sterile conditions rapidly died within the first 24 h after infection (FIG. 22A), suggesting that conventional rainbow trout microbiota provided resistance to F. columnare Fc7 infection. To identify the culturable species within conventional trout microbiota, we plated on various agar growth media dilutions of material extracted from 3 conventional rainbow trout larvae at 35 dph. Individual 16S-based determination of the diversity of bacteria forming colonies on the tested media identified 11 different bacterial strains that were isolated and i stored individually (Table 4).

TABLE 4
The 11 species isolated from conventional rainbow trout larvae
Bacterial species isolated from trout microbiota

Aeromonas rivipollensis
Pseudomonas helmanticensis
Aeromonas rivipollensis
Pseudomonas baetica
Aeromonas hydrophyla
Flavobacterium plurextorum
Acinetobacter sp.
Flavobacterium plurextorum
Delftia acidovorans
Flavobacterium sp.
Pseudomonas sp.

[0257] To test whether these 11 culturable strains could contribute to the protection against F. columnare infection observed in Conv trout, we re-conventionalized GF rainbow trout larvae at 22 dph with a mix of all 11 bacterial strains (hereafter called Mix11), each at a concentration of 5×10⁵ CFU/ml. Monitoring the survival of these re-conventionalized trout after exposure to F. columnare strain Fc7 showed that Re-Conv^{Mix11} larvae survived as well as conventional fish (FIG. 22B). These results demonstrated that presence of the 11 bacterial strains isolated from the rainbow trout microbiota recapitulate the full protection against F. columnare infection observed in conventional fish.

[0258] Resistance to F. columnare infection is conferred by one member of the trout microbiota To determine whether some individual members of the protective Mix11 could play key roles in infection resistance, we mono-re-conventionalized 22 dph GF trout by each of the 11 isolated bacterial strains at 5.10⁵ CFU/ml followed by challenge with F. columnare Fc7. We found that only Flavobacterium sp. strain 4466 restored Conv-level protection, whereas the other 10 strains displayed no protection, whether added individually (FIG. 23A) or as a mix (Mix10 in FIG. 23B). To evaluate the colonization of gastrointestinal tract by Flavobacterium sp. strain 4466 and/or F. columnare Fc7, we plated intestines from mono-reconventionalized fish 24 hours after infection in TYES agar after dissection in sterile conditions. Interestingly, whereas both Flavobacterium sp. strain 4466 and F. columnare Fc7 were able to successfully colonize the gut of mono-exposed rainbow trout (FIG. 23C), we only detected to Flavobacterium sp. after trout's infection by F. columnare Fc7 (FIG. 23C), suggesting a potential competition between both bacterial species. Consistently, although cell-free spent supernatant of Flavobacterium sp. strain 4466 showed no inhibitory activity against F. columnare Fc7 in an overlay assay (FIG. 28A), Flavobacterium sp. strain 4466 colony growth inhibited the growth of F. columnare Fc7 (FIG. 28B) and of all tested F. columnare strains (FIG. 28C), suggesting a potential contact dependent inhibition. We identified a cluster of 12 genes potentially associated to this phenotype in the Flavobacterium sp. strain 4466 genome (tssB, tssC, tssD, tssE, tssF, tssG, tssH, tssI, tssK, tssN, tssP and tssQ) characteristic of type 6 secretion system (T6SS), T6SSⁱⁱⁱ, a contact-dependent antagonistic system only present in phylum Bacteroidetes [32]. To improve the taxonomic identification of the protective Flavobacterium isolated from the trout larvae microbiota, we performed whole genome sequencing followed by Average Nucleotide Identity (ANI) analysis. We determined that despite similarity with Flavobacterium spartansii (94.65%) and Flavobacterium tructae (94.62%), these values are lower than the 95% ANI needed to identify two organisms as the same species [204]. Furthermore, full-length 16S rRNA and recA genes comparisons also showed high similarity with F. spartansii and F. tructae, however, the obtained values were also below the 99% similarity threshold required to consider that two organisms belong to the same species (See Table at pages 5-6 herein). Similarly, a maximum likelihood based phylogenetic tree (FIG. 29) generated from sequences of 15 bacterial strains from the Flavobacterium genus revealed that the sequence of Flavobacterium sp. strain 4466 clustered with sequences of F. spartansii and F. tructae, but did not allow the identification of Flavobacterium sp. strain 4466 at species level.

Endogenous Flavobacterium sp. Strain 4466 Protects Germ-Free Rainbow Trout Against Infection by Different Strains of F. columnare.

[0259] To test whether the protective Flavobacterium sp. isolated from the Conv rainbow trout microbiome could protect rainbow trout we re-conventionalized GF fish larvae with Flavobacterium sp. 48 hours before exposure to four virulent F. columnare strains (Fc7, ALG-00-530, IA-S-4, and Ms-Fc-4) belonging to genomovars I and II, and isolated from different geographical origins and host fish species. Flavobacterium sp. strain 4466 conferred protection to rainbow trout larvae against all F. columnare strains (FIG. 30). Therefore, the Flavobacterium sp. strain identified from trout Mix11 is a putative probiotic potentially protecting trout and other fish from columnaris disease.

Use of Germ-Free Trout to Identify Exogenous Probiotics Against F. columnare Infection.

[0260] Our results demonstrated that GF trout could be used as a gnotobiotic models to identify bacteria protecting against F. columnare infection. To determine whether this controlled gnotobiotic approach could be used to identify probiotic beyond bacteria present in trout microbiota, we pre-exposed 22 dph GF rainbow trout larvae to Chryseobacterium massiliae, a bacterium previously shown to protect larval stage and adult zebrafish from infection by F. columnare [Stressmann et al.]. After 48 of balneation with C. massiliae at 10⁶ cfu/mL, we infected trout larvae with four strains of F. columnare: Fc7, ALG-00-530, IA-S-4, and Ms-Fc-4, belonging to the genomovars I and II, and isolated from different geographical origins and host (Table 2). As previously observed in zebrafish axenic model. C. massiliae protects also rainbow trout larvae against F. columnare infection (FIG. 24). Taken together, these results showed that GF rainbow trout enable to rationally identified bacterial species, endogenous or not to trout, with probiotic potential against highly virulent Flavobacterium pathogens.

### Bacterial Taxonomic Identification of the Protective Microorganisms

[0261] To taxonomically identify the protective Chryseobacterium sp. and Flavobacterium sp. strain 4466, isolated from the zebrafish and trout larvae microbiota, we performed whole genome sequencing followed by Average Nucleotide Identity (ANI) analysis. The morphotype corresponding to Chryseobacterium sp. was identified at species level as Chryseobacterium massiliae, with a whole-genome similarity of 95,85% (See Tables pages 5 to 7 of present description). Concerning Flavobacterium sp. strain 4466, we determined that despite similarity with Flavobacterium spartansii (94.65%) and Flavobacterium tructae (94.62%), these values are lower than the 95% ANI needed to identify two organisms as the same species [204]. Furthermore, full-length 16S rRNA and recA genes comparisons also showed high similarity with F. spartansii and F. tructae, however, the obtained values were also below the 99% similarity threshold required to consider that two organisms belong to the same species (See Tables pages 5 to 7 of present description).

### Antimicrobial Genes Prediction

[0262] Antimicrobial resistance (AMR) gene(s) were found using AMRFinderPlus from the full sequenced genome of each strain. This tool is documented in Feldgarden, M., Brover, V., Haft, D. H., Prasad, A. B., Slotta, D. J., Tolstoy, I., Tyson, G. H., Zhao, S., Hsu, C.-H., McDermott, P. F., Tadesse, D. A., Morales, C., Simmons, M., Tillman, G., Wasilenko, J., Folster, J. P., Klimke, W., 2019. Validating the NCBI AMRFinder Tool and Resistance Gene Database Using Antimicrobial Resistance Genotype-Phenotype Correlations in a Collection of NARMS Isolates. Antimicrob. Agents Chemother. 63 no. 11 (Nov. 1, 2019): e00483-19 https://doi.org/10.1128/AAC.00483-19, so that its implementation is available to the skilled person.

[0263] No evidence of AMR genes was detected in the genome of Chryseobacterium sp.

[0264] The Flavobacterium sp. 4466 strain chromosome revealed genes encoding resistance to carbapenem, lincosamide, streptogramin, pleuromutilin, and fluoroquinolone antibiotics (Table 6).

TABLE 6
Antimicrobial Resistance genes identification.
Antimicrobial resistance (AMR) gene(s) were found using AMRFinderPlus,
using either protein annotations or nucleotide sequence from the
whole-genome of Flavobacterium sp. strain 4466.

| | | | ARO (Best | Identity |
|---|---|---|---|---|
| Drug class | Mechanism | AMR Gene Family | hit) | (%) |
| Carbapenem | inactivation | IND beta-lactamase | IND-6 | 100 |
| Lincosamide | efflux | ATP-binding cassette (ABC) | IsaA | 100 |
| antibiotic; | | antibiotic efflux pump | | |
| streptogramin | | | | |
| antibiotic; | | | | |
| pleuromutilin | | | | |
| antibiotic | | | | |
| Carbapenem; | inactivation | JOHN beta-lactamase | JOHN-1 | 78.5 |
| cephalosporin; | | | | |
| penam | | | | |
| Fluoroquinolone | efflux | resistance-nodulation-cell | adeF | 42.3 |
| antibiotic; | | division (RND) antibiotic | | |
| tetracycline | | efflux pump | | |
| antibiotic | | | | |
| Fluoroquinolone | efflux | resistance-nodulation-cell | adeF | 42.5 |
| antibiotic; | | division (RND) antibiotic | | |
| tetracycline | | efflux pump | | |
| antibiotic | | | | |

### Virulence Genes Prediction

[0265] The isolated strain Chryseobacterium sp. contained five predicted virulence factors, including some proteins involved in capsule biosynthesis, heat shock protein HtpB subunit, KatA catalase and ClpP protease proteolytic subunit (Table 7).

[0266] Table 7. Virulence genes identification for Chryseobacterium massiliae. Virulence factor coding gene(s) were predicted using the Virulence Factors Database, using either protein annotations or nucleotide sequence from the whole-genome of Chryseobacterium massiliae.

[0267] For Flavobacterium sp. 4466, genes encoding for capsule, sialic acid synthase, type IV and type VI secretion systems effectors and catalase were found as potential virulence factors (Table 8).

TABLE 8
Virulence genes identification for Flavobacterium sp. strain 4466.
Virulence factor coding genes were predicted using the Virulence Factors Database,
using either protein annotations or nucleotide sequence from the
whole-genome of Flavobacterium sp strain 4466.

| | | | Query |
|---|---|---|---|
| Description | E-value | Identity (%) | coverage (%) |
| UDP-galactopyranose mutase [Capsule] (cpsl) | 2.420e−40 | 64.41 | 94.52 |
| UDP-galactopyranose mutase [Capsule] (glf) | 2.580e−84 | 67.36 | 93.98 |
| Sialic acid synthase (neuB1) | 5.670e−86 | 67.76 | 92.8 |
| Hsp60, 60K heat shock protein HtpB [Hsp60] | 1.160e−147 | 68.07 | 92.51 |
| (htpB) | | | |
| Coxiella Dot/Icm type IVB secretion system | 3.380e−45 | 65.19 | 75.9 |
| translocated effector, trans-2-enoyl-CoA | | | |
| reductase [T4SS effectors] | | | |
| UDP-N-acetylglucosamine 2-epimerase (neuC1) | 4.740e−43 | 66.55 | 74.11 |
| GDP-mannose 4,6-dehydratase [O-antigen] | 3.460e−114 | 71.54 | 73.74 |
| (gmd) | | | |
| GDP-D-mannose dehydratase [Capsule] (gmd) | 4.510e−62 | 67.63 | 70.3 |
| Catalase-peroxidase KatB [KatAB (VF0168)] | 9.350e−81 | 6537 | 65.94 |
| (katB) | | | |
| Polysialic acid capsule biosynthesis protein SiaC | 6.920e−66 | 69 | 65.03 |
| [Capsule] (siaC/synC) | | | |
| Catalase/(hydro)peroxidase [KatAB] (katA) | 2.860e−68 | 64.93 | 61.18 |
| Vi polysaccharide biosynthesis protein, UDP- | 4.260e−57 | 67.28 | 54.03 |
| glucose/GDP-mannose dehydrogenase TviB | | | |
| (tviB) | | | |

### Discussion

[0268] Many studies focus on the effects of microbial diversity on the properties of higher-order bacterial community. In this study, we evidenced a novel community-level protective effect of the resident microbiota against deadly infection. More specifically, we used re-conventionalization of otherwise germ-free zebrafish larvae to show that conventional-level protection against infection by a broad range of highly virulent F. columnare strains is provided by a set of 10 culturable bacterial strains belonging to 9 different species from standard laboratory zebrafish microbiota. With the exception of the Bacteroidetes C. massiliae, this protective consortium was dominated by Proteobacteria such as Pseudomonas and Aeromonas spp. and by bacteria commonly found in aquatic environments. Despite the relative permissiveness of zebrafish larvae microbiota to environmental variations and inherent variability between samples [36], we showed that these ten bacteria were also identified as predominant in four different zebrafish facilities, suggesting the existence of a core microbiota with important functionality.

[0269] Use of germ-free and gnotobiotic zebrafish larvae exposed to controlled combinations of bacterial species enabled us to show a very robust species-specific protection effect in larvae mono-associated with C. massiliae. We also identified a community-level protection provided by the combination of the 9 other species composing the protective zebrafish larvae microbiota that were otherwise unable to protect against F.columnare when provided individually. This protection was however less reproducible (full protection seen in only 50% of the tests performed) and required a minimum inoculum of 5.10⁴ cfu/mL, compared to 5.10² cfu/mL with C. massiliae. These results therefore suggest the existence of two distinct microbiota-based protection scenarios against infection by F. columnare, a membership effect provided by C. massiliae, and a threshold effect mediated by the Mix9 consortium.

[0270] Neither of these two protection mechanisms against F. columnare infection seem to rely on microbiota-based immuno-modulation. However, we cannot exclude that, individually, some members of the protective Mix10 could induce, pro- or anti-inflammatory responses masked in presence of the mixed microbiota [1]. Whereas the identification of mechanisms involved in the community-level Mix9 protection will require further studies, re-conventionalization and dysbiosis and recovery experiments demonstrated the key role of C. massiliae in resistance against F. columnare. This protection could be provided by a number of mechanisms, including nutrient depletion or competition, adhesion inhibition, release of inhibitory metabolites and stimulation of host immune defenses [6, 12, 37]. [37]. As Mix9 and C. massiliae showed a difference in minimum cell density required for protection, it is also possible that for the latter, F. columnare infection triggers a relatively density-independent protection mechanism in C. massiliae by direct antagonistic niche-exclusion. F. columnare and C. massiliae are indeed both bacteroidetes, and, besides direct resource competition, several mechanisms of niche exclusion were shown to occur between phylogenetically close Bacteroidetes species, including toxin production [38, 39] or toxin-injection dependent on the Type 6 secretion system [40]. Experiments are currently underway to identify non-protective C. massiliae mutants to further analyze its protective mechanism. Interestingly, infected larvae re-conventionalized with either C. massiliae or Mix9 showed no signs of the intestinal damage displayed by germ-free larvae, suggesting that both C. massiliae and Mix9 provide similar intestinal resistance to F. columnare infection. Whereas microbial colonization contributes to gut maturation and stimulates the production of epithelial passive defenses such as mucus [41, 42], lack of intestinal maturation is unlikely to be contributing to F. columnare-induced mortality, as mono-colonized larvae or larvae re-conventionalized with non-protective mixes died as rapidly as GF larvae.

[0271] Several studies have monitored the long-term assembly and development of the zebrafish microbiota from larvae to sexually mature adults, however little is known about the initial colonization of the larvae after hatching [43, 44]. Neutral (stochastic) and deterministic (host niche-based) processes [45-47] lead to microbial communities that are mostly represented by a limited number of highly abundant species with highly diverse low-abundant populations. In our experiments, the Mix10 species inoculum corresponded to an equiratio bacterial mix, thus starting from assumed total evenness (E=1) [48, 49]. Since evenness was still relatively high (0.84) and remained very similar up until 8h in our study, this indicated that most of the ten species were able to colonize the larvae. From the perspective of community composition, a loss of diversity is often associated with decreased colonization resistance, but it remains unclear whether this increased susceptibility is due to the loss of certain key member species of the microbial community and/or a change in their prevalence [7, 8]. We investigated resistance to infection by exposing established bacterial communities to different antibiotic perturbations, followed by direct challenge with F. columnare (to study core microbiota sensitivity to disturbance) or after recovery (to study its resilience) [11, 50]. Antibiotics are known to shift the composition and relative abundances of the microbiota according to their spectrum [12, 51]. We observed that penicillin/streptomycin treatment that would affect most of the core species reduced the abundance of all but two species (A. veronii 1 and P. myrsinacearum) that became relatively dominant during recovery but failed to provide protection against F. columnare. With the kanamycin treatment, colonization resistance was fully restored at the end of the recovery period, indicative of a resilience that could result from species recovering quickly to their pre-perturbation levels due to fast growth rates, physiological flexibility or mutations [52]. Interestingly, even taking into account potential biases associated with the use of the 16S rDNA as a proxy index to determine relative abundance [53, 54], evenness was similarly reduced during recovery for both treatments, but abundance at phylum level changed to 48% for Proteobacteria, and 52% for Bacteroidetes compared to the >98% of Proteobacteria with the penicillin/streptomycin treatment. Furthermore, C. massiliae was detected as rare (<1%) in conventional larvae, suggesting that it could have a disproportionate effect on the community or that community-level protection provided by the nine other bacteria was also responsible for the protection of conventional larvae to F. columnare infection.

[0272] Despite the phenotypic homogeneity of symptoms associated with columnaris disease caused by F. columnare on cold and warm water fish, F. columnare strains show high genetic diversity making infection animal models difficult to standardize [34, 55, 56]. Our studies showed that germ-free zebrafish larvae are highly susceptible to a variety of different genomovars isolated from different hosts, demonstrating that they are a robust animal model for the study of F. columnare pathogenicity. Although F. columnare infection causes important losses in aquaculture, there is no consensus on the molecular bases of F. columnare virulence. Secreted enzymes such as chondroitin AC lyase acting on connective tissue [33, 57-59], and collagenase [60] have been suggested as possible virulence factors [31]. Recently, F. columnare mutants in Type 9 secretion system (T9SS) were shown to be avirulent in adult zebrafish, suggesting that proteins secreted by the T9SS are likely to be key for virulence [33]. The colonization process of F. columnare also remains largely unidentified [31]. In salmonid fish, the gills are major sites of infection, but body skin, fins and tail are also frequently damaged, and septicemia can occur in severe cases [57]. In salmon, gross tissue damage of several organs was associated with low virulent strains, whereas highly virulent strains killed before such damage was seen [31]. We could not identify clear F. columnare infection sites in zebrafish larvae by histology, perhaps due to its very low dose of infection, with less than 100 cfu recovered from infected moribund larvae. However, several lines of evidence suggest that the gut is the main target of F. columnare infection in our model: (i) unfed GF larvae survived exposure, (ii) histology analysis showing severe disruption of the intestinal region just hours after infection in GF larvae, and (iii) induction of il22 in GF larvae exposed to F. columnare, since a major function of IL-22 is to promote gut repair [61]. This induction appears to be a consequence of the pathogen-mediated damage, as there was no observed induction in conventional or re-conventionalized larvae. The very rapid death of larvae likely caused by this severe intestinal damage probably explains why little damage could be observed in other common target organs of columnaris such as the gills, skin and fins.

[0273] Many bacterial diseases affect aquaculture, and cannot be controlled by vaccination because they affect young fry or because efficient vaccines are not available (for example, for flavobacterioses). In these cases, antibiotic use remain the only option, potentially resulting in spread of antibiotic resistance. There is an urgent need for the development of alternative treatments [11]. In the case of F. columnare infections, both high genetic variability and broad host range constitute an important limitation for the identification of effective probiotics against this widespread pathogen. In this study, we showed that C. massiliae could be a promising probiotic candidate to prevent columnaris diseases as it provided full and robust protection against all tested virulent F. columnare genomovars and was also able to significantly increased survival of adult conventional zebrafish exposed to this pathogen. Whereas further studies are needed to elucidate C. massiliae protection potential in other teleost fish, the endogenous nature of C. massiliae suggest that it could establish itself as a long-term resident of the zebrafish larval and adult microbiota, an advantageous trait when seeking probiotic adaptability to targeted fish species [62]. While short-term residing probiotics potentially limit unintended consequences to the microbial community and host system, use of endogenous residents can stably modulate the community and protect the fish over long periods against reoccurring disease outbreaks [63].

[0274] In conclusion, the use of a simple and tractable fish model to mine indigenous fish microbiota as a source of protection against a fish pathogen further underlines the power of the zebrafish model for analysis of microbiota function. Our study contributes to the expansion of knowledge on microbiota-mediated colonization and infection resistance against an important fish pathogen. Further study will determine the potential of endogenous bacteria as aquaculture probiotics to improve the health and production of other teleost fish.

[0275] Use of probiotics to improve fish growth performance and health and limit the use of chemical and antibiotic treatment is now a common approach to control disease outbreaks in fish farming industry [123, 140, 141]. However, identification and characterization of protective bacteria are hampered by experimental variability associated with administration and infection challenges performed in open environmental conditions using poorly controlled conventional fish. The development of robust and reproducible gnotobiotic models are therefore instrumental to develop fish probiotics [125, 131]. Here, we established a new model of germ-free and gnotobiotic model of rainbow trout, enabling the controlled study of probiotic-based protection against infection caused by several fish bacterial pathogens.

[0276] The resistance of rainbow trout eggs to the effective disinfection protocol eliminated the microbial community associated to the egg surface, enabling routinely raise of germ-free larvae for up to 35 dph at 16° ° C. without continued exposure to antibiotics. Our protocol is therefore comparable to gnotobiotic protocols used for zebrafish [136, 142], cod larvae [128], and stickleback (Gasterosteus aculeatus) that are not dependent on continued addition of antibiotics, hence avoiding possible long-term effects on fish development [131]. Further, after hatching, fish larvae were immediately transferred to cell culture flasks with vented caps. Fish husbandry in flasks presents some disadvantages that hinder long-term experiments such as the no way to aerate water and to perform water changes automatically [131]. These constraints limit this model as an effective method for short-term experiments. The relative short-term of the experiments performed to investigate infection resistance in trout larvae, while effective to control sterility, present the disadvantage to work with larvae with low complexity microbiota. Axenic and gnotobiotic conditions are artificial compared to the conventional conditions of larval rearing, in both fish farming or wild-life [128]. However, even if adding a bacterial strain as pure culture may not be representative of the effect of natural host-associated microbiota, this model is an excellent available tool for the study of the effects of specific bacterial additives, without any microbial interference.

[0277] Raising under germ-free conditions has no major impact on development and growth of rainbow trout larvae at 21dph. Similar results were reported for germ-free stickleback larvae at 14 dph [143]. In sea bass (D. labrax L.) germ-free raised larvae reported higher growth and more developed gut compared to conventionally raised larvae [144]. This controversy could come from the fact that in our study and in GF stickleback, anatomical analysis was performed before the first-feeding, whereas germ-free sea bass were externally fed. Fish initially acquire nutrients by absorbing their endogenous yolk until the intestinal track is open from the mouth to the vent. We cannot rule out that, at later developmental stage or after fish first-feeding differences may occur in the global body weight as well as in the structure and size of organs such as gut between GF and conventional fish.

[0278] Salmonids, including rainbow trout, are commercially important species, which production in intensive aquaculture facilities is associated with increased susceptibility to diseases caused by viruses, bacteria, fungi and parasites [145]. Here, we tested the sensitivity of germ-free and conventional trout larvae to major salmonid freshwater pathogens. This led to identify F. columnare as a highly virulent species, lethal for GF larvae. F. columnare, is the causative agent of columnaris diseases, affecting several aquaculture fish species [137, 146] and an emerging problem for larval and juvenile rainbow trout [147, 148]. By contrast with the high sensitivity displayed by germ-free trout, conventional larvae reared from non-sterilized eggs were fully resistant to F. columnare infection and we showed that commensal microbiota harbored by conventional trout larvae plays an essential role in protecting against F. columnare.

[0279] While GF conditions cannot be compared to those prevailing in the wild or used in fish farming [205], our results showed that GF rainbow trout larvae are highly susceptible to F. columnare, the causative agent of columnaris disease affecting many aquaculture fish species [206,207]. Although our histology analysis comparing GF and Conv larvae infected or not by F. columnare Fc7 did not show any major sign of inflammation of damage, we observed that the number of Goblet cells per crypt increases in infected GF larvae and decreased in Conv larvae. A healthy intestine is determined by biological markers such as Goblet cells count, which secrete mucus with bactericidal properties [208]. Interestingly, a significative decrease in the number of Goblet cells was also observed of non-infected GF larvae compared to those of Conv larvae, as previously reported in zebrafish [209]. The absence of stimulating microorganisms in GF larvae could lead to a dysregulated acute immune response after F. columnare infection. These results suggest that the microbiota influence cell differentiation (or maturation) in trout gut epithelium [210], potentially affecting for some aspect of the protection against F. columnare infection.

[0280] Different studies have demonstrated that high diverse gut communities exert higher protection on the host [149-151]. This constitute the bases for the paradoxical negative effect on fish health associated with the massive utilization of antibiotics in aquaculture, which, by reducing microbiota diversity in turn, facilitates colonization by opportunistic pathogens [152].

[0281] Whereas this advocates for practices leading to enrichment of fish microbial community to minimize pathogenic invasions in aquaculture [122], our results demonstrates that resistance to infection can be achieved by the relatively low complexity of the culturable microbiota identified in conventional trout larvae. We indeed only identified 11 different bacterial species from conventional rainbow trout larvae microbiota, nevertheless conferring full protection to re-conventionalized GF trout. Whereas example of resistance to infection provided by controlled bacterial consortia in gnotobiotic host often rely more on community structure than on individual members of the microbiota [153-156], we showed that the protection observed for the bacterial consortium composed of the 11 identified microorganisms is mainly due to the presence of Flavobacterium sp strain 4466. We cannot however, rule out that, at later developmental stages, the presence of other bacterial species may be needed for more efficient implantation or stability of protective members in the trout microbiota.

[0282] For the past 30 years, the fish farming industry dedicated a considerable amount of efforts to identify probiotic microorganisms for rainbow trout, including Gram-positive and Gram-negative bacteria and yeast [157]. However, the irreproducibility of many of the in vivo experimentations, the high interindividual and seasonal variability of trout microbiota composition and the random of limited colonization ability of exogenous microorganism rarely enable to firmly establish probiotic properties [158-160]. Identification of Flavobacterium sp., an indigenous member of trout larvae microbiota protecting against F. columnare infection suggested that such bacteria could be used as probiotics to prevent infections. Although there is yet no clear evidence that probiotics of indigenous origin would perform better than probiotic exogenous to the target host [161], the use of beneficial indigenous bacteria isolated from aquatic organisms is gaining recognition for controlling pathogens within the aquaculture industry [162].

[0283] The high genetic variability of F. columnare, and its broad host range constitute an important limitation for the identification of effective probiotics against this widespread pathogen. Several probiotic candidates isolated from the host provided partial protection against F. columnare infection in other conventional fish species such as walleye (Sander vitreous) and brook charr (Salvelinus fontinalis) [163, 164]. However, a high protection variability was observed for probiotic strains used on brook charr challenged with F. columnare, depending on the fish family used. As authors suggested, based on that microbiota composition is directly influenced by the host genotype, each family genetic background controls the efficiency of probiotic effect on the pathogen [163]. Using germ-free or gnotobiotic animal models, as proposed in this study, should decrease this variability for a more precise evaluation of probiotic candidate strains. According to the different criteria defined for bacterial probiotic selection [157, 161], our study suggests that Flavobacterium sp., could be considered as promising endogenous probiotics, which potential in aquaculture needs to be further established on different stages of trout life cycle.

[0284] More precisely, inventors have in particular demonstrated the ability of Flavobacterium sp. strain 4466 isolated from Conv trout larvae microbiota to protect against F. columnare infection. Furthermore, this bacterium, but not its supernatant, inhibits F. columnare growth in vitro, which suggests a direct interaction between Flavobacterium sp. strain 4466 and F. columnare. Intriguingly, Flavobacterium sp. strain 4466 encodes a complete subtype T6SSⁱⁱ, a molecular mechanism that delivers antimicrobial effector proteins upon contact with target cells and is unique to the phylum Bacteroidetes [211]. The members of Flavobacterium genus are ubiquitous inhabitants of freshwater and marine fish microbiota and both commensal and pathogenic Flavobacterium often share the same ecological niche [212-214]. Whether the Flavobacterium sp. strain 4466 T6SSⁱⁱⁱ contact-dependent killing system contributes to colonization resistance by inhibiting F. columnare Fc7 growth is currently under investigation. We cannot, however, exclude other mechanisms such as competition for nutrients or pathogen exclusion upon direct competition for adhesion to host tissues. This process has been suggested for infected zebrafish with efficient colonization of highly adhesive probiotic strains and enhanced life expectancy [215,216,217].

[0285] Interestingly, our germ-free rainbow trout larvae model also allowed us to demonstrate the protective activity of Chryseobacterium massiliae, a potential probiotic bacterium isolated from conventional zebrafish [Stressman], against different strains of F. columnare from different host and geographical origins. These results support C. massiliae as a potential probiotic to prevent columnaris diseases in other teleost fish apart from its original host, zebrafish. Further, this germ-free fish model shows a wide range of possibility for the study of endogenous and exogenous potential probiotic strains against infections.

[0286] In conclusion, by using experimental conditions reducing microbiota variability, germ free rainbow trout larvae allow to perform a challenges under gnotobiotic conditions, and lead to clear analysis of protection phenotypes against fish pathogens. This approach will also be instrumental in studying the host-pathogen interaction under controlled conditions to better understand the virulence mechanisms used by fish pathogens. Altogether, this model could contribute to mitigate rainbow trout fish diseases in the context of aquaculture research and husbandry.

### Material and Methods

[0287] Bacterial strains and growth conditions. Bacterial strains used in this study are listed in Table 1. F. columnare strains (Table 5) were grown at 28° C. in tryptone yeast extract salts (TYES) broth [0.4% (w/V) tryptone, 0.04% yeast extract, 0.05% (w/v) MgSO₄ 7H₂O, 0.02% (w/V) CaCl₂) 2H₂O, 0.05% (w/V) D-glucose, pH 7.2]. F. columnare were assigned into four genomovar groups using 16S rDNA restriction fragment length polymorphism analysis, including genomovar I, I/II, II, and III[64]. All 10 Mix10 microbiota species were grown in Luria Bertani (LB) at 28° C.

TABLE 5
Flavobacterium columnare strains used in this study

| | | |
|---|---|---|
| | | Source or |
| Strain | Description | Reference |

F. columnare strains

| | | |
|---|---|---|
| FPC666 | F. columnare isolated from Misgurnus anguillicaudatus (Japan). | J.F. Bernardet col. |
| FPC667 | F. columnare isolated from Carassius auratus (Japan). | J.F. Bernardet col. |
| LD40 07/2489 | F. columnare isolated from Acipenser baeri (France). | J.F. Bernardet col. |
| LVDI 39/1 | UNKNOWN | J.F. Bernardet col. |
| JIP 17/01 | F. columnare isolated from Cyprinus carpio (France). | J.F. Bernardet col. |
| JIP P06/90 | F. columnare isolated from Ictalurus melas (France). | J.F. Bernardet col. |
| LVDL 3414/89 | F. columnare isolated from Anguilla anguilla (France). | J.F. Bernardet col. |
| UJ H2 | F. columnare isolated from Oncorhynchus mykiss (Finland). | J.F. Bernardet col. |
| UJ B259 | F. columnare isolated from outlet water of a rearing tank with | J.F. Bernardet col. |
| | infected Oncorhynchus mykiss (Finland). | |
| Fc4 | F. columnare isolated from Oncorhynchus mykiss (USA). | J.F. Bernardet col. |
| Fc7 | F. columnare isolated from Oncorhynchus mykiss (USA). | J.F. Bernardet col. |
| JIP P11/91 | F. columnare isolated from Oncorhynchus mykiss (France). | J.F. Bernardet col. |
| JIP 44/00 | | J.F. Bernardet col. |
| NCIMB2248 | F. columnare isolated from Oncorhynchus tshawytscha (USA). | J.F. Bernardet col. |
| JIP 39/87 | F. columnare isolated from Ictalurus punctatus (France). | J.F. Bernardet col. |
| JIP 07/02(1) | F. columnare isolated from Cyprinus carpio (France). | J.F. Bernardet col. |
| ALG-00-530 | F. columnare isolated from Ictalurus punctatus (USA). | {Olivares-Fuster, |
| | | 2011 #101} |
| JIP 14/00 | F. columnare isolated from Paracheirodon innesi (France). | J.F. Bernardet col. |
| EK28 | F. columnare isolated from Anguilla japonica (Japan). | J.F. Bernardet col. |
| AJSI | F. columnare isolated from Poecilia sphenops (Belgium). | J.F. Bernardet col. |
| JIP 13/00 | F. columnare isolated from Paracheirodon innesi (Hong Kong). | J.F. Bernardet col. |
| JIP 02/06(1) | F. columnare isolated from Betta splendens (Singapore). | J.F. Bernardet col. |
| VB1 | F. columnare isolated from Poecilia reticulata (France). | J.F. Bernardet col. |
| VB2 | F. columnare isolated from Poecilia reticulata (France). | J.F. Bernardet col. |
| LDA39 H4927 | F. columnare isolated from Ictalurus melas (France). | J.F. Bernardet col. |
| SNARCC90 | F. columnare isolated from Ictalurus punctatus (USA). | J.F. Bernardet col. |
| CIP109753 | F. columnare isolated from Plecoglossus altivelis (Japan). | CRBIP |
| C#2 | F. columnare isolated from Pelteobagrus fulvidraco (Unknown). | {Li N. et al., 2017} |
| FCC-2 | ΔgldN in strain C#2 | {Li N. et al., 2017} |
| FCC-8 | ΔporV in strain C#2 | {Li N. et al., 2017} |
| FCC-3 | FCC-2 + pLN8 for gldN complementation | {Li N. et al., 2017} |
| FCC-9 | FCC-8 + pLN11 for porV complementation | {Li N. et al., 2017} |

### Ethics Statement

[0288] All animal experiments described in the present study were conducted at the Institut Pasteur (larvae) or at INRA Jouy-en-josas (adults) according to European Union guidelines for handling of laboratory animals (http://ec.europa.eu/environment/chemicals/lab_animals/home_en.htm) and were approved by the relevant institutional Animal Health and Care Committees.

[0289] General handling of zebrafish. Wild-type AB fish, originally purchased from the Zebrafish International Resource Center (Eugene, OR, USA), or myd88-null mutants (myd88^{hu3568/hu3568} [35], kindly provided by A. H Meijer (Leiden University, the Netherlands), were raised in our facility. A few hours after spawning, eggs were collected, rinsed, and sorted under a dissecting scope to remove feces and unfertilized eggs. All following procedures were performed in a laminar microbiological cabinet with single-use disposable plasticware. Fish were kept in sterile 25 cm³ vented cap culture flasks containing 20 ml of water (0-6 dpf-15 fish per flasks) or 24-well microtiter plates (6-15 dpf-1 fish per 2 mL well) in autoclaved mineral water (Volvic) at 28° C. Fish were fed 3 times a week from 4 dpf with germ-free Tetrahymena thermophila protozoans [23]. Germ-free zebrafish were produced after sterilizing the egg chorion protecting the otherwise sterile egg, with antibiotic and chemical treatments (see below), whereas conventional larvae (with facility-innate microbiota) were directly reared from non-sterilized eggs and then handled exactly as the germ-free larvae.

[0290] Sterilization of zebrafish eggs. Egg sterilization was performed as previously described with some modifications [23]. Freshly fertilized zebrafish eggs were first bleached (0.003%) for 5 min, washed 3 times in sterile water under gentle agitation and maintained overnight groups of 100 eggs per 75 cm³ culture flasks with vented caps containing 100 mL of autoclaved Volvic mineral water supplemented with methylene blue solution (0,3 μg/mL). Afterwards, eggs were transferred into 50 mL Falcon tubes (100 eggs per tube) and treated with a mixture of antibiotics (500 μL of penicillin G: streptomycin, 10,000 U/ml: 10 mg/mL GIBCO #P4333), 200 μL of filtered kanamycin sulfate (100 mg/mL, SERVA Electrophoresis #26899) and antifungal drug (50 μL of amphotericin B solution Sigma-Aldrich (250 μg/mL) #A2942) for 2 h under agitation at 28° C. Eggs were then washed 3 times in water under gentle agitation and bleached (0.003%) for 15 min, resuspending the eggs every 3 min by inversion. Eggs were washed again 3 times in water and incubated 10 min with 0,01% Romeiod (COFA, Coopérative Française de l'Aquaculture). Finally, eggs were washed 3 times in water and transferred into 25 cm³ culture flasks with vented caps containing 20 ml of water. After sterilization, eggs were transferred with approximately 30 to 35 eggs/flasks, and were transferred into new flasks at 4 dpf before reconventionalization with 10 to 15 fish /flask. We monitored sterility at several points during the experiment by spotting 50 μL of water from each flask on LB, TYES and on YPD agar plates, all incubated at 28° C. under aerobic conditions. Plates were left for at least 3 days to allow slow-growing organisms to multiply. Spot checks for bacterial contamination were also carried out by PCR amplification of water samples with the 16S rDNA gene primers and procedure detailed further below. If a particular flask was contaminated, those fish were removed from the experiment.

[0291] Procedure for raising germ-free zebrafish. After hatching, fish were fed with germ-free T. thermophila 3 times per week from 4 dpf onwards. (i) T. thermophila stock. A germ-free line of T. thermophila was maintained at 28° ° C. in 20 mL of PPYE (0.25% protease peptone BD Bact #211684, 0.25% yeast extract BD Bacto #212750) supplemented with penicillin G (10 unit/mL) and streptomycin (10 μg/mL). Medium was inoculated with 100 μl of the preceding T. thermophila stock. After one week of growth, samples were taken, tested for sterility on LB, TYES and YPD plates and restocked again. (ii) Growth. T. thermophila were incubated at 28° C. in MYE broth (1% milk powder, 1% yeast extract) inoculated from stock suspension at a 1:50 ratio. After 24 h of growth, Tetrahymena were transferred to Falcon tubes and washed (4400 rpm, 3 min at 25° C.) 3 times in 50 mL of autoclaved Volvic water. Finally. T. thermophila were resuspended in water and added to culture flasks (500 μL in 20 mL) or 24-well plates (50 μL/well). Sterility of T. thermophila was tested by plating and 16S rDNA PCR as described in the section above. (iii) Fine-powder feeding. When indicated, fish were fed with previously [symbol] -ray-sterilized fine-powdered food suitable for an early first feeding gape size (ZM-000 fish feed, ZM Ltd) every 48 hours [65].

[0292] Reconventionalization of germ-free zebrafish. At 4 dpf, just after hatching, zebrafish larvae were reconventionalized with a single bacterial population or a mix of several. The 10 bacterial species constituting the core protective microbiota were grown for 24 h in suitable media (TYES or LB) at 28° C. Bacteria were then pelleted and washed twice in sterile water, and all adjusted to the same cell density (OD₆₀₀=1 or 5.10⁷ cfu/mL) (i) Reconventionalization with individual species. Bacteria were resuspended and transferred to culture flasks containing germ-free fish at a final concentration of 5.10⁵ cfu/mL. (ii) Reconventionalization with bacterial mixtures. For the preparation of Mix10, Mix9, Mix8 and all other mixes used, equimolar mixtures were prepared by adding each bacterial species at initial concentration to 5.10⁷ cfu/mL. Each bacterial mixture suspension was added to culture flasks containing germ-free fish at a final concentration of 5×10⁵ cfu/mL.

[0293] Infection challenges. F. columnare strains (Table 5) were grown overnight in TYES broth at 28° C. Then, 2 mL of culture were pelleted (10,000 rpm for 5 min) and washed once in sterile water. GF zebrafish were brought in contact with the tested pathogens at 6 dpf for 3 h by immersion in culture flasks with bacterial doses ranging from 5.10² to 5.10⁷ cfu/mL. Fish were then transferred to individual wells of 24-well plates, containing 2 ml of water and 50 UL of freshly prepared GF T. thermophila per well. Mortality was monitored daily as described in and as few as 54±9 cfu/larva of F. columnare were recovered from infected larvae. All zebrafish experiments were stopped at day 9 post-infection and zebrafish were euthanized with tricaïne (MS-222) (Sigma-Aldrich #E10521). Each experiment was repeated at least 3 times and between 10 and 15 larvae were used per condition and per experiment.

Collection of Eggs from Other Zebrafish Facilities

[0294] Conventional zebrafish eggs were collected in 50 mL Falcon tubes from the following facilities: Facility 1: Nadia Soussi-Yanicostas facility in Hopital Robert Debré, Paris; Facility 2: Jussieu A2, University Paris 6; Facility 3: Jussieu—C8 (UMR7622), University Paris 6; Facility 4: AMAGEN commercial facility, Gif sur Yvette; Larvae were treated with the same rearing conditions, sterilization and infection procedures used in the Institut Pasteur facility.

[0295] Determination of fish bacterial load using cfu count. Zebrafish were euthanized with tricaine (MS-222) (Sigma-Aldrich #E10521) at 0.3 mg/mL for 10 minutes. Then they were washed in 3 different baths of sterile PBS-0.1% Tween to remove bacteria loosely attached to the skin. Finally, they were transferred to tubes containing calibrated glass beads (acid-washed, 425 μm to 600 μm, SIGMA-ALDRICH #G8772) and 500 μL of autoclaved PBS. They were homogenized using FastPrep Cell Disrupter (BIO101/FP120 QBioGene) for 45 s at maximum speed (6.5 m/s). Finally, serial dilutions of recovered suspension were spotted on TYES agar and cfu were counted after 48 h of incubation at 28° C.

[0296] Characterization of zebrafish microbial content. Over 3 months, the experiment was run independently 3 times and 3 different batches of eggs were collected from different fish couples in different tanks. Larvae were reared as described above. GF and Conv larvae were collected at 4 dpf, 6 dpf and 11 dpf for each batch. Infected Conv larvae were exposed to F.columnnare^{ALG} for 3 h by immersion as described above. For each experimental group, triplicate pools of 10 larvae (one in each experimental batch) were euthanized, washed and lysed as above. Lysates were split into 3 aliquots, one for culture followed by 16S rDNA gene sequencing (A), for 16S rDNA gene clone library generation and Sanger sequencing (B) and for Illumina metabarcoding-based sequencing (C).

A) Bacterial Culture Followed by 16S rDNA Gene-Based Identification

[0297] Lysates were serially diluted and immediately plated on R2A, TYES, LB, MacConkey, BHI, BCYE, TCBS and TSB agars and incubated at 28°C. for 24-72h. For each agar, colony morphotypes were documented, and colonies were picked and re-streaked on the same agar in duplicate. In order to identify the individual morphotypes, individual colonies were picked for each identified morphotype from each agar, vortexed in 200 μL DNA-free water and boiled for 20 min at 90ºC. Five μL of this bacterial suspension were used as template for colony PCR to amplify the 16S rDNA gene with the universal primer pair for the Domain bacteria 8f (5′-AGA GTT TGA TCC TGG CTC AG-3′ (SEQ ID NO:7)) and 1492r (5′-GGT TAC CTT GTT ACG ACT T-3′ (SEQ ID NO:8)). Each primer was used at a final concentration of 0.2 μM in 50 μL reactions. PCR cycling conditions were—initial denaturation at 94° C. for 2 min, followed by 32 cycles of denaturation at 94° C. for 1 min, annealing at 56° ° C. for 1 min, and extension at 72° ° C. for 2 min, with a final extension step at 72° C. for 10 min. 16S rDNA gene PCR products were verified on 1% agarose gels, purified with the Qiaquick® PCR purification kit and two PCR products for each morphotype were sent for sequencing (Eurofins, Ebersberg, Germany). 16S rDNA sequences were manually proofread, and sequences of low quality were removed from the analysis. Primer sequences were trimmed, and sequences were compared to GenBank (NCBI) with BLAST, and to the Ribosomal Database Project with SeqMatch. For genus determination a 95% similarity cut-off was used, for Operational Taxonomic Unit determination, a 98% cut-off was used.

B) 16S rDNA Gene Clone Library Generation

[0298] Total DNA was extracted from the lysates with the Mobio PowerLyzer® Ultraclean® kit according to manufacturer's instructions. Germ-free larvae and DNA-free water were also extracted as control samples. Extracted genomic DNA was verified by Tris-acetate-EDTA-agarose gel electrophoresis (1%) stained with GelRed and quantified by applying 2.5 μL directly to a NanoDrop® ND-1000 Spectrophotometer. The 16S rDNA gene was amplified by PCR with the primers 8f and 1492r, and products checked and purified as described in section A. Here, we added 25-50 ng of DNA as template to 50 μL reactions. Clone libraries were generated with the pGEM®-T Easy Vector system (Promega) according to manufacturer's instructions. Presence of the cloned insert was confirmed by colony PCR with vector primers gemsp6 (5′-GCT GCG ACT TCA CTA GTG AT-3′ (SEQ ID NO:9)) and gemt7 (5′-GTG GCA GCG GGA ATT CGA T-3′ (SEQ ID NO:10)). Clones with an insert of the correct size were purified as above and sent for sequencing (Eurofins, Ebersberg, Germany). Blanks using DNA-free water as template were run for all procedures as controls. Clone library coverage was calculated with the following formula [1−(n₁/N₂)]×100, where n₁ is the number of singletons detected in the clone library, and N₂ is the total number of clones generated for this sample. Clone libraries were generated to a minimum coverage of 95%, and a minimum of 48 clones was generated for each sample. Sequence analysis and identification was carried out as in section A.

C) By 16S rDNA Gene Illumina Sequencing

[0299] To identify the 16S rDNA gene diversity in our facility and fish collected from 4 other zebrafish facilities, fish were reared as described above. GF fish were sterilised as above, and uninfected germ-free and conventional fish were collected at 6 dpf and 11 dpf. Infection was carried out as above with F. columnare^{ALG} for 3h by bath immersion, followed by transfer to clean water. Infected conventional fish were collected at 6 dpf 6h after infection with F. columnare and at 11 dpf the same as uninfected fish. GF infected larvae were only collected at 6 dpf 6h post infection, as at 11 dpf all larvae had succumbed to infection. Triplicate pools of 10 larvae were euthanized, washed and lysed as above. Total DNA was extracted with the Mobio PowerLyzer® Ultraclean® kit as described above and quantified with a NanoDrop® ND-1000 Spectrophotometer and sent to IMGM Laboratories GmbH (Germany) for Illumina sequencing. Primers Bakt_341F (5′-CCTACGGGNGGCWGCAG-3′ (SEQ ID NO:11)) and Bakt_805R (5′-GACTACHVGGGTATCTAATCC-3′ (SEQ ID NO:12)), amplifying variable regions 3 and 4 of the 16S gene were used for amplification [63].

[0300] Each amplicon was purified with solid phase reversible immobilization (SPRI) paramagnetic bead-based technology (AMPure XP beads, Beckman Coulter) with a Bead:DNA ratio of 0.7:1 (v/v) following manufacturer's instructions. Amplicons were normalized with the Sequal-Prep Kit (Life Technologies), so each sample contained approximately 1 ng/μl DNA. Samples, positive and negative controls were generated in one library. The High Sensitivity DNA LabChip Kit (was used on the 2100 Bioanalyzer system (both Agilent Technologies) to check the quality of the purified amplicon library. For cluster generation and sequencing, MiSeq® reagents kit 500 cycles Nano v2 (Illumina Inc.) was used. Before sequencing, cluster generation by two-dimensional bridge amplification was performed, followed by bidirectional sequencing, producing 2×250 bp paired-end (PE) reads.

[0301] MiSeq® Reporter 2.5.1.3 software was used for primary data analysis (signal processing, de-multiplexing, trimming of adapter sequences). CLC Genomics Workbench 8.5.1 (Qiagen) was used for read merging, quality trimming and QC reports and OTU definition were carried out in the CLC plugin Microbial Genomics module.

### Comparison of Whole Larvae Vs Intestinal Bacterial Content

[0302] Larvae reconventionalized with Mix10 and infected with F. columnare^{ALG} at 6 dpf for 3h were euthanized and washed. DNA was extracted from pools of 10 whole larvae or of pools of 10 intestinal tubes dissected with sterile surgical tweezer and subjected to Illumina 16S rDNA gene sequencing. GF larvae and dissected GF intestines were sampled as controls. No statistically significant difference was found between whole fish and gut bacterial content (p=0.99). Entire larvae were therefore used in the experiment monitoring bacterial establishment and recovery.

### Whole Genome Sequencing

[0303] Chromosomal DNA of the ten species composing the core of zebrafish larvae microbiota was extracted using the DNeasy Blood & Tissue kit (QIAGEN) including RNase treatment. DNA quality and quantity were assessed on a NanoDrop ND-1000 spectrophotometer (Thermo Scientific). DNA sequencing libraries were made using the Nextera DNA Library Preparation Kit (Illumina Inc.) and library quality was checked using the High Sensitivity DNA LabChip Kit on the Bioanalyzer 2100 (Agilent Technologies). Sequencing clusters were generated using the MiSeq reagents kit v2 500 cycles (Illumina Inc.) according to manufacturer's instructions. DNA was sequenced at the Helmholtz Centre for Infection Research by bidirectional sequencing, producing 2×250 bp paired-end (PE) reads. Between 1,108,578 and 2,914,480 reads per sample were retrieved with a median of 1,528,402. Reads were quality filtered, trimmed and adapters removed with fastq-mcf {Aronesty, 2011 #29} and genomes assembled using SPAdes 2.5.1 {Bankevich, 2012 #123}

[0304] Bacterial species identification. Whole genome-based bacterial species identification was performed by the TrueBac ID system (v1.92, DB:20190603) [https://www.truebacid.com/; [66]. Species-level identification was performed based on thealgorithmic cut-off set at 95% ANI when possible or when the 16S rDNA gene sequence similarity was >99%.

### Monitoring of Bacterial Dynamics

[0305] Three independent experiments were run over 6 weeks with eggs collected from different fish couples from different tanks to monitor establishment and recovery. Larvae were reared, sterilized and infected as above with the only difference that 75 cm³ culture flasks with vented caps (filled with 50 mL of sterile Volvic) were used to accommodate the larger number of larvae required, as in each experiment, larvae for time course Illumina sequencing were removed sequentially from the experiment that monitored the survival of the larvae. Animals were pooled (10 larvae for each time point/condition), euthanized, washed and lysed as described above and stored at −20° ° C. until the end of the survival monitoring, and until all triplicates had been collected.

### A) Community Establishment

[0306] In order to follow the establishment of the 10 core strains in the larvae, GF larvae were reconventionalized with an equiratio Mix10 as above. Reconv^{Mix10} larvae were sampled at 4 dpf immediately after addition of the 10 core species and then 20 min. 2h, 4h and 8h after. Germ-free, conventional larvae and the inoculum were also sampled as controls.

### B) Induction of Dysbiosis

[0307] Different doses of kanamycin (dose 1=200 μg/mL; dose 2=50 μg/ml; dose 3=25 μg/mL) and a penicillin/streptomycin antibiotic mix (dose 1=250 μg/mL; dose 2=15,6 μg/mL were tested on reconv^{Mix10} 4 dpf zebrafish larvae by adding them to the flask water to identify antibiotic treatments that were non-toxic to larvae but that caused dysbiosis.

[0308] After 16 hours of treatment, antibiotics were extensively washed off with sterile water and larvae were challenged with F. columnare^{ALG}, leading to the death of all larvae—e.g. successful abolition of colonization resistance with best results in all repeats with 250 μg/mL penicillin/streptomycin and 50 μg/mL kanamycin as antibiotic treatment.

### C) Community Recovery

[0309] As in B) after 8h of incubation, 4 dpf recon^{Mix10} larvae were treated with 250 μg/mL penicillin/streptomycin and 50 μg/mL kanamycin for 16h. Antibiotics were extensively washed off and larvae were now left to recover in sterile water for 24h to assess resilience of the bacterial community. Samples (pools of 10 larvae) were taken at 3h, 6h, 12h, 18h and 24h during recovery and sent for 16S rDNA Illumina sequencing. Larvae were then challenged at 6 dpf with F.columnare^{ALG} for 3h and survival was monitored daily for 10 days post-infection.

[0310] All time course samples were sequenced by IMGM Laboratories GmbH as described above.

### Statistical Analysis of Metataxonomic Data.

[0311] 16S RNA analysis was performed with SHAMAN {Volant, 2019 #125}]. Library adapters, primer sequences, and base pairs occurring at 5′ and 3′ends with a Phred quality score <20 were trimmed off by using Alientrimmer (v0.4.0). Reads with a positive match against zebrafish genome (mm10) were removed. Filtered high-quality reads were merged into amplicons with Flash (v1.2.11). Resulting amplicons were clustered into operational taxonomic units (OTU) with VSEARCH (v2.3.4) [Rognes, T., Flouri, T., Nichols, B., Quince, C., & Mahé, F. (2016). VSEARCH: a versatile open source tool for metagenomics. PeerJ, 4, e2584.] The process includes several steps for de-replication, singletons removal, and chimera detection. The clustering was performed at 97% sequence identity threshold, producing 459 OTUs. The OTU taxonomic annotation was performed against the SILVA SSU (v132) database {Quast, 2012 #126} completed with 16S sequence of 10 bacterial communities using VSEARCH and filtered according to their identity with the reference {Yarza, 2014 #127}. Annotations were kept when the identity between the OTU sequence and reference sequence is ≥78.5% for taxonomic Classes, ≥82% for Orders, ≥86.5% for Families, ≥94.5% for Genera and ≥98% for species. Here, 73.2% of the OTUs set was annotated and 91.69% of them were annotated at genus level.

[0312] The input amplicons were then aligned against the OTU set to get an OTU contingency table containing the number of amplicon associated with each OTU using VSEARCH global alignment. The matrix of OTU count data was normalized for library size at the OTU level using a weighted non-null count normalization. Normalized counts were then summed within genera. The generalized linear model (GLM) implemented in the DESeq2 R package⁹⁵ was then applied to detect differences in abundance of genera between each group. We defined a GLM that included the treatment (condition) and the time (variable) as main effects and an interaction between the treatment and the time. Resulting P values were adjusted according to the Benjamini and Hochberg procedure.

[0313] The statistical analysis can be reproduced on shaman by loading the count table, the taxonomic results with the target and contrast files which are available on figshare https://doi.org/10.6084/m9.figshare. 11417082.v2.

### Determination of Cytokine Levels

[0314] Total RNAs from individual zebrafish larvae were extracted using RNeasy kit (Qiagen), 18h post pathogen exposure (12hs post-wash). Oligo(dT17)-primed reverse transcriptions were done using M-MLV H-reverse-transcriptase (Promega). Quantitative PCRs were performed using Takyon SYBR Green PCR Mastermix (Eurogentec) on a StepOne thermocycler (Applied Biosystems). Primers for ef1a (housekeeping gene, used for cDNA amount normalization), il1b, il10 and il22 are described in (Rendueles 2012). Data were analyzed using the ΔΔCt method. Four larvae were analyzed per condition. Zebrafish genes and proteins mentioned in the text: ef1a NM_131263; il1b BC098597; il22 NM_001020792; il10 NM_001020785; myd88 NM_212814

Histological Comparisons of GF, Conv and Re-Conv Fish GF and Conventional Fish Infected or not with F. columnare.

[0315] Fish were collected 24 h after infection (7 dpf) and were fixed for 24h at 4° C. in Trump fixative (4% methanol-free formaldehyde, 1% glutaraldehyde in 0.1 M PBS, PH 7.2) and sent to the PIBISA Microscopy facility (https://microscopies.med.univ-tours.fr/) in the Faculté de Médecine de Tours, (France) where whole fixed animals were processed, embedded in Epon. Semi-thin sections (1 μm) and cut using a X ultra-microtome and then either dyed with toluidine blue for observation by light microscopy and imaging or processed for Transmission electron microscopy.

Adult Zebrafish Pre-Treatment with C. massiliae

[0316] The zebrafish line AB was used. Fish were reared at 28° C. in dechlorinated recirculated water, then transferred in continuous flow aquaria when aging 3-4 months for infection experiments. C. massiliae was grown in TYES broth at 150 rpm and 28° C. until stationary phase. This bacterial culture was washed twice in sterile water and adjusted to OD₆₀₀ nm=1. Adult fish re-conventionalization was performed by adding C. massiliae bacterial suspension directly into the fish water (1L) at a final concentration of 2.10⁶ cfu/mL. Bacteria were maintained in contact with fish for 24 h by stopping the water flow then subsequently removed by restoring the water flow. C. massiliae administration was performed twice after water renewal. In the control group, the same volume of sterile water was added.

### Adult Zebrafish Infection Challenge

[0317] F. columnare infection was performed just after fish re-conventionalization with C. massiliae. The infection was performed as previously described by Li and co-workers with few modifications [Li et al., 2017]. Briefly, F. columnare strain ALG-0530 was grown in TYES broth at 150 rpm and 28° C. until late-exponential phase. Then, bacterial cultures were diluted directly into the water of aquaria (200 mL) at a final concentration of 5.10⁶ cfu/mL. Bacteria were maintained in contact with fish for 1 h by stopping the water flow then subsequently removed by restoring the water flow. Sterile TYES broth was used for the control group. Bacterial counts were determined at the beginning of the immersion challenge by plating serial dilutions of water samples on TYES agar. Water was maintained at 28° C. and under continuous oxygenation for the duration of the immersion. Groups were composed of 10 fish. Virulence was evaluated according to fish mortality 10 days post-infection.

[0318] Statistical methods. Statistical analyses were performed using unpaired, non-parametric Mann-Whitney test. Analyses were performed using Prism v8.2 (GraphPad Software). .

[0319] Evenness: The Shannon diversity index was calculated with the formula (Hs=−Σ[P(In(P)]) where P is the relative species abundance. Total evenness was calculated for the Shannon index as E=H_{S}/Hₘₐₓ. The less evenness in communities between the species (and the presence of a dominant species), the lower this index is.

### Handling of Rainbow Trout Larvae

[0320] The rainbow trout eggs post fertilization were obtained from Aqualande Group in France. Upon arrival, the eggs were acclimatized at 16° C. before their manipulation. All procedures were performed in a laminar microbiological cabinet and with single-use disposable plastic ware. Eggs were kept in 145×20 mm Petri dish until hatching in 75 mL autoclaved dechlorinated water. After hatching, fish were transferred and kept in 250 mL vented cap culture flasks in 100 mL sterile water at 16° C. Fish were fed 21 days post-hatching with irradiated powder food. To avoid waste accumulation and oxygen limitation, we renewed a half the volume of the water every two days to keep rainbow trout larvae healthy.

### Sterilization and Raising of Germ-Free Rainbow Trout

[0321] The rainbow trout eggs were first transferred to sterile Petri dish (140 mm. 150 eggs/dish) and washed twice with sterile methylene blue solution (0.05 mg/mL). Next, we kept freshly fertilized eggs in 75 mL of methylene blue solution and to be exposed to a cocktail of antibiotics previously described for 5 h (750 UL penicillin G (10,000U/mL)/streptomycin (10 mg/mL): 300 μL of filtered kanamycin sulfate (100 mg/mL) and 75 μL of antifungal drug Amphotericin B solution (250 μg/mL)) under agitation at room temperature. Then eggs were washed 3 times with fresh sterile water. After, they were bleached (0,005%) for 15 min. Eggs were washed again 3 times with sterile water. Afterwards, eggs were treated with Romeiod, an iodophore disinfection solution for 10 min. Finally, eggs were washed 3 times and we kept them at 16° C. in 75 mL of sterile water supplemented with antibiotics until hatching. Five to seven days after treatment eggs spontaneously hatched. Once hatched, fish were immediately transferred to 75 cm³ vented cap culture flasks containing 100 mL of fresh sterile water without antibiotics (12 larvae/flask). The hatching percentage was determined by counting hatched larvae in Petri dish to the total amount of eggs.

[0322] We monitored sterility at different moments during the experiment by spotting 50 μL of rearing water from each flask in LB agar plates, YPD agar and TYES agar, all incubated at 16° ° C. under aerobic conditions. We also checked fish larvae for bacterial contamination every week. Randomly chosen fish were sacrificed by an overdose of filtered tricaine methane sulfonate solution (MS222, 300 mg/L). Whole fish were mechanically disrupted in Lysing Matrix tubes containing 1 mL of sterile water and 425-600 μm glass beads (Sigma). Samples were homogenized at 6.0 m s⁻¹ for 45 s on a FastPrep-24 instrument (XXX). Serial dilutions of the homogenized solution were plated on TYES agar, YPD agar and LB agar. When water samples or collected euthanized and homogenized fish showed any bacterial CFU over any of different culture media used, these animals (or flask) were removed from the experiment. The absence of any contamination in the fish larvae was further confirmed by PCR using primers specific for the chromosomal 16S region (27F: 5′-AGAGTTTGATCCTGGCTCAG-3′ (SEQ ID NO: 13); 1492R 5′-GGTTACCTTGTTACGACTT-3′ (SEQ ID NO:14)) [177].

### Bacterial Strains and Growth Conditions

[0323] Bacterial strains used in this study are listed in Table 2. F. columnare strains Fc7 and IA-S-4, and Chryseobacterium massiliae were grown at 150 rpm and 18° ° C. in tryptone yeast extract salts (TYES) broth [0.4% (w/v) tryptone, 0.04% yeast extract. 0.05% (w/V) MgSO₄ 7H₂O, 0.02% (w/v), CaCl₂) 2H₂O, 0.05% (w/v) D-glucose, pH 7.2]. F. psychrophilum strains THCO2-90 and FRGDSA 1882/11 were grown in TYES broth at 150 rpm and 28° C. Yersinia ruckeri strain JIP 27/88 was grown in Luria-Bertani (LB) medium at 150 rpm and 28° C. V. anguillarum strain 1669 was grown in tryptic soy broth (TSB) at 150 rpm and 28° C. L. garvieae was grown in brain heart infusion (BHI) broth at 150 rpm and 28° C. If required, 15 g/L of agar was added for solid medium. Stock cultures were preserved at −80° ° C. in respective broth containing 20% (vol/vol) glycerol.

### Fish Infection Challenge

[0324] Pathogenic bacteria were grown in suitable media at different temperatures until advanced stationary phase. Then, each culture was pelleted (10,000 rpm for 5 min) and washed once in sterile water. Bacteria were resuspended and bacteria were added to culture flasks at a final concentration 10⁷ cfu/mL. After 24 hours of incubation with pathogenic bacteria at 16° C., fish were washed three times by water renewing. Between 10 to 12 larvae were used per condition per experiment. Bacterial counts were determined at the beginning and at the end of immersion challenge by plating serial dilutions of water samples on specific medium for each pathogen. Each experiment was repeated at least 2 times. Virulence was evaluated according to fish mortality 10 days post-infection.

### Characterization of Culturable Conventional Rainbow Trout Microbiota

[0325] To identify the species constituting the cultivable conventional microbiota, 3 conventional rainbow trout larvae were sacrificed with an overdose of MS222 at 31 dph. These fish were homogenized following the protocol described above and serial dilutions of homogenized suspension were plated on different culture media: TYES agar, LB agar, R2A agar and TSA. The plates were incubated a 16° C. for 48 to 72 hours. After incubation, each morphologically distinct colony (based on form, size, color, texture, elevation and margin) were isolated and conserved at −80° C. in respective broth containing 15% (vol/vol) glycerol. Individual 16S-based identification by amplifying and sequencing the 16S chromosomal region using the universal oligonucleotides 27F and 1492R. Afterwards, 16S rRNA gene sequences were compared with those available in the EzBioCloud database [178].

### Germ Free Rainbow Trout Microbial Re-Conventionalization

[0326] Each isolated bacterial species was grown for 24 h in suitable media at 150 rpm and 28° C. Bacteria were then pelleted and washed twice in sterile water. They were diluted at a final concentration of 5×10⁷ cfu/mL. At 22 dph, germ-free rainbow trout were re-conventionalized by adding 1 mL of each bacterial suspension into the flasks (5×10⁵ cfu/mL, final concentration). In case of fish re-conventionalization with bacteria consortia, after bacterial washes, all isolated species were mixed in an aqueous suspension, each at a concentration of 5×10⁷ cfu/mL. Afterward, this mixed bacterial suspension was added to the flask containing germ-free rainbow trout as described. In all cases, fish re-conventionalization was performed for 48 h, followed by the infection challenge with F. columnare. Bacterial suspensions were added immediately after water renewing. Each experiment was repeated at least 2 times.

### Histological Examination

[0327] Histological sections were used to compare microscopical lesions between GF and conventional fish after infection with F. columnare. Sacrificed animals were fixed for 24h at 4° C. in Trump fixative (4% methanol-free formaldehyde, 1% glutaraldehyde in 0.1 M PBS, pH 7.2) [179]. Whole fixed animals were processed and then blocked in Epon. Semi-thin sections (1 μm) were cut using an ultra-microtome and stained with toluidine blue for observation by light microscopy and imaging.

3D Imaging of Cleared Fish by Optical Projection Tomography (iDISCO)

[0328] For a 3D imaging of cleared whole fish, Fishes were fixed with 4% formaldehyde in PBS overnight at 4° C. Fixed samples were rinsed with PBS. To render tissue transparent, fishes were first depigmented by pretreatment in SSC 0.5× twice during 1h at RT followed by an incubation in SSC 0.5×+KOH 0.5%+H₂O₂ 3% during 2h at RT. Depigmentation was stopped by incubation in PBS twice during 15 min. Then fishes were post-fixed with 2% formaldehyde in PBS during 2h at RT and then rinsed twice with PBS for 30 min. Depigmented fishes were cleared with the iDISCO+ protocol [Renier, 2016] (Renier et al 2016,PMID 27238021). Briefly, samples were progressively dehydrated in ascending methanol series (20%, 40%, 60%, 80% in H2O and 100% twice) during 1 hour for each step. The dehydrated samples were bleached by incubation in methanol+5% H₂O₂ at 4° C. overnight, followed by incubation in methanol 100% twice for 1h. They were then successively incubated in 67% dichloromethane+33% methanol during 3 hours, dichloromethane during 1 hour and finally dibenzylether until fishes became completely transparent. Whole sample acquisition was performed on a light-sheet ultramicroscope (LaVision Biotec, Bielefeld, Germany) with a 2× objective using a 0.63× zoom factor. Autofluorescence was acquired by illuminating both sides of the sample with 488 nm laser. Z-stacks were acquired with a 2 μm z-step.

### Whole Genome Sequencing.

[0329] Chromosomal DNA of Flavobacterium sp. strain 4466 isolated from rainbow trout larvae microbiota was extracted using the DNeasy Blood & Tissue kit (QIAGEN) including RNase treatment. DNA quality and quantity was assessed on a NanoDrop ND-1000 spectrophotometer (Thermo Scientific). DNA sequencing libraries were made using the Nextera DNA Library Preparation Kit (Illumina inc.) and library quality was checked using the High Sensitivity DNA LabChip Kit on the Bioanalyzer 2100 (Agilent Technologies). Sequencing clusters were generated using the MiSeq reagents kit v2 500 cycles (Illumina Inc.) according to manufacturer's instructions. DNA was sequenced at the Mutualized Platform for Microbiology at Institut Pasteur by bidirectional sequencing, producing 2×150 bp paired-end (PE) reads. Reads were quality filtered, trimmed and adapters removed with fastq-mcf and genomes assembled using SPAdes 3.9.0 [219].

### Phylogenomic Analysis.

[0330] The proteomes for the 15 closest Flavobacterium strains identified by the ANI analysis were retrieved from the NCBI RefSeq database (Table below).

| Specie | Assembly | Host | BioSample | FTP |
|---|---|---|---|---|
| F. tructae | GCF_002217475.1 | Oncorhynchus mykiss | SAMN06049067 | https://ftp.ncbi.nlm.nih.gov/genomes/all/ |
| | | | | GCF/002/217/475/GCF_002217475.1_ASM221747v1/ |
| F. spartasanii | GCF_002217445.1 | Oncorhynchus | SAMN06049056 | https://ftp.ncbi.nlm.nih.gov/genomes/all/ |
| | | tshawytscha | | GCF/002/217/445/GCF_002217445.1_ASM221744v1/ |
| F. chilense | GCF_001602525.1 | Environment | SAMN04506025 | https://ftp.ncbi.nlm.nih.gov/genomes/all/ |
| | | (Loyalsock Creek, | | GCF/001/602/525/GGF_001602525.1_ASM160252v1/ |
| | | USA) | | |
| F. plurextorum | GCF_002217395.1 | Oncorhynchus mykiss | SAMN06049068 | https://ftp.ncbi.nlm.nih.gov/genomes/all/ |
| | | | | GCF/002/217/395/GCF_002217395.1_ASM221739v1/ |
| F. oncorhynchi | GCF_002217355.1 | Oncorhynchus mykiss | SAMN06049060 | https://ftp.ncbi.nlm.nih.gov/genomes/all/ |
| | | | | GCF/002/217/355/GCF_002217355.1_ASM221735v1/ |
| F. denitrificans | GCF_000425445.1 | Aporrectodea | SAMN02441540 | https://ftp.ncbi.nlm.nih.gov/genomes/all/ |
| | | caliginosa | | GCF/000/425/445/GCF_000425445.1_ASM42544v1/ |
| F. cutihirudines | GCF_003385895.1 | Hirudo verbana | SAMN05444268 | https://ftp.ncbi.nlm.nih.gov/genomes/all/ |
| | | | | GCF/003/385/895/GCF_003385895.1_ASM338589v1/ |
| F. aurantiacus | GCF_000016645.1 | NA | SAMN02598357 | https://ftp.ncbi.nlm.nih.gov/genomes/all/ |
| | | | | GCF/000/016/645/GCF_000016645.1_ASM1664v1/ |
| F. hibernum | GCF_000832125.1 | Environment | SAMN02934118 | https://ftp.ncbi.nlm.nih.gov/genomes/all/ |
| | | (freshwater Antarctic | | GCF/000/832/125/GCF_000832125.1_ASM83212v1/ |
| | | lake) | | |
| F. piscis | GCF_001686925.1 | NA | SAMN04570197 | https://ftp.ncbi.nlm.nih.gov/genomes/all/ |
| | | | | GCF/001/686/925/GCF_001686925.1_ASM168692v1/ |
| F. frigidimoris | GCA_900129595.1 | Environmental | SAMN05444481 | https://ftp.ncbi.nlm.nih.gov/genomes/all/ |
| | | (Antarctic seawater) | | GCA/900/129/595/GCA_900129595.1_IMG- |
| | | | | taxon_2695420960_annotated_assembly/ |
| F. araucananum | GCF_002222055.1 | Salmo salar | SAMN06049049 | https://ftp.ncbi.nlm.nih.gov/genomes/all/ |
| | | | | GCF/002/222/055/GCF_002222055.1_ASM222205v1/ |
| F. sp. Leaf82 | GCF_001422725.1 | Arabidopsis thaliana | SAMN04151618 | https://ftp.ncbi.nlm.nih.gov/genomes/all/ |
| | | | | GCF/001/422/725/GCF_001422725.1_Leaf82/ |
| F. sp. LM4 | GCF_002017935.1 | Environmental (Lake | SAMN06263772 | https://ftp.ncbi.nlm.nih.gov/genomes/all/ |
| | | Michigan, USA) | | GCF/002/017/935/GCF_002017935.1_ASM201793v1/ |
| F. pectinovorum | GCF_900142715.1 | NA | SAMN0S444387 | https://ftp.ncbi.nlm.nih.gov/genomes/all/ |
| | | | | GCF/900/142/715/GCF_900142715.1_IMG- |
| | | | | taxon_2698536748_annotated_assembly/ |
| F. sp. GV028 | GCF_003386855.1 | NA | SAMN08778959 | https://ftp.ncbi.nlm.nih.gov/genomes/all/ |
| | | | | GCF/003/386/855/GCF_003386855.1_ASM338685v1/ |

[0331] These sequences together with the Flavobacterium sp. strain UGB 4466 proteome were analyzed with Phylophlan (version 0.43, march 2020) [220]. This method uses the 400 most conserved proteins across the proteins and builds a Maximum likelihood phylogenetic tree using RAxML (version 8.2.8) [221]. Maximum likelihood tree was boostrapped with 1000 replicates.

### Agar Overlay Assay for Growth Inhibition Detection

[0332] The growth inhibitory effect of Flavobacterium sp. 4466 has been evaluated using an agar spot test. Briefly. 125 μl from an overnight culture of different strains of F. columnare adjusted to OD 1 were mixed to 5 ml of top agar (0.7% agar) and overlaid on plates of TYES agar. Five μL of overnight culture of Flavobacterium sp. 4466 were then spotted on the overlay of targeted bacteria. The plates were incubated at 28° ° C. for 24 hours. Growth inhibition of F. columnare was recorded by observation of a clear halo surrounding Flavobacterium sp. colony. Sterile TYES broth was used as a mock and the experiment were performed in triplicate.

### Whole Genome Sequencing for Taxonomic Identification, Antimicrobial Resistance and Virulence Factor Prediction Based on Whole Genome Sequence Analysis

[0333] Chromosomal DNA of Chryseobacterium sp, Delftia sp. strain 4465 (available in ENA (European Nucleotide Archive) database under primary accession number ERS4574863 (version 1) and secondary accession number SAMEA6847265 (Tax ID 80866, scientific name Delftia acidovorans), and Flavobacterium sp. strain 4466 was extracted using the DNeasy Blood & Tissue kit (QIAGEN) including RNase treatment. DNA quality and quantity were assessed on a NanoDrop ND-1000 spectrophotometer (Thermo Scientific). DNA sequencing libraries were made using the Nextera DNA Library Preparation Kit (Illumina Inc.) and library quality was checked using the High Sensitivity DNA LabChip Kit on the Bioanalyzer 2100 (Agilent Technologies). Sequencing clusters were generated using the MiSeq reagent kit with v2 chemistry for 500 cycles (Illumina Inc.) according to manufacturer's instructions. DNA was sequenced at the Mutualized Platform for Microbiology at Institut Pasteur with bidirectional sequencing, producing 2×150 bp paired-end (PE) reads. Reads were quality filtered, trimmed and adapters removed with fastq-mcf and genomes assembled using SPAdes 3.9.0 [202].

### Whole Genome Analysis for Taxonomic Identification, Antimicrobial Resistance and Virulence Factor Prediction Based on Whole Genome Sequence Analysis

[0334] A whole genome analysis was performed for Chryseobacterium sp., Delftia sp. strain 4465 (available in ENA (European Nucleotide Archive) database under primary accession number ERS4574863 (version 1) and secondary accession number SAMEA6847265 (Tax ID 80866, scientific name Delftia acidovorans)), and Flavobacterium sp. strain 4466 with the TrueBac ID system (v1.92, DB:20190603) (https://www.truebacid.com/) [203]. Species-level identification was performed based on the algorithmic cut-off set at 95% Average Nucleotide Identity (ANI), or when the 16S rRNA gene sequence similarity was >99%. Virulence factors were identified using Virulence Factors Database (VFDB, http://www.mgc.ac.cn/VFs/). Antimicrobial resistance (AMR) gene(s) were found using AMRFinderPlus, a tool that identifies AMR genes using either protein annotations or nucleotide sequence via National Center for Biotechnology Information (https://www.ncbi.nlm.nih.gov/pathogens/antimicrobialresistance/AMRFinder/).

### REFERENCES

[0335] 1. Rolig, A. S., et al., Individual Members of the Microbiota Disproportionately Modulate Host Innate Immune Responses. Cell Host Microbe, 2015. 18(5): p. 613-20.
[0336] 2. McFall-Ngai, M. J., Unseen forces: the influence of bacteria on animal development. Dev Biol, 2002. 242(1): p. 1-14.
[0337] 3. Cani, P. D. and N. M. Delzenne, The role of the gut microbiota in energy metabolism and metabolic disease. Curr Pharm Des, 2009. 15(13): p. 1546-58.
[0338] 4. Falcinelli, S., et al., Lactobacillus rhamnosus lowers zebrafish lipid content by changing gut microbiota and host transcription of genes involved in lipid metabolism. Sci Rep, 2015. 5: p. 9336.
[0339] 5. Stecher, B. and W. D. Hardt, The role of microbiota in infectious disease. Trends Microbiol, 2008. 16(3): p. 107-14.
[0340] 6. Stecher, B. and W. D. Hardt, Mechanisms controlling pathogen colonization of the gut. Curr Opin Microbiol, 2011. 14(1): p. 82-91.
[0341] 7. van der Waaij. D., J. M. Berghuis-de Vries, and J. E. C. Lekkerkerk-van der Wees, Colonization resistance of the digestive tract and the spread of bacteria to the lymphatic organs in mice. The Journal of Hygiene, 1972. 70: p. 335-342.
[0342] 8. Littman, D. R. and E. G. Pamer, Role of the commensal microbiota in normal and pathogenic host immune responses. Cell Host Microbe, 2011. 10(4): p. 311-23.
[0343] 9. Heselmans, M., et al., Gut flora in health and disease: potential role of probiotics. Curr Issues intest Microbiol, 2005. 6(1): p. 1-7.
[0344] 10. Boirivant, M. and W. Strober, The mechanism of action of probiotics. Curr Opin Gastroenterol, 2007. 23(6): p. 679-92.
[0345] 11. Robinson, C. J., B. J. Bohannan, and V. B. Young, From structure to function: the ecology of host-associated microbial communities. Microbiol Mol Biol Rev. 2010. 74(3): p. 453-76.
[0346] 12. Vollaard, E. J. and H. A. Clasener, Colonization resistance. Antimicrob Agents Chemother, 1994. 38(3): p. 409-14.
[0347] 13. Gill, H. S., Probiotics to enhance anti-infective defences in the gastrointestinal tract. Best Pract Res Clin Gastroenterol, 2003. 17(5): p. 755-73.
[0348] 14. Falcinelli, S., et al., Probiotic treatment reduces appetite and glucose level in the zebrafish model. Sci Rep, 2016. 6: p. 18061.
[0349] 15. Rawls, J. F., B. S. Samuel, and J. I. Gordon, Gnotobiotic zebrafish reveal evolutionarily conserved responses to the gut microbiota. Proc Natl Acad Sci USA, 2004. 101(13): p. 4596-601.
[0350] 16. Meeker, N. D. and N. S. Trede, Immunology and zebrafish: spawning new models of human disease. Dev Comp Immunol, 2008. 32(7): p. 745-57.
[0351] 17. Kanther, M. and J. F. Rawls, Host-microbe interactions in the developing zebrafish. Curr Opin Immunol, 2010. 22(1): p. 10-9.
[0352] 18. Milligan-Myhre, K., et al., Study of host-microbe interactions in zebrafish. Methods Cell Biol, 2011. 105: p. 87-116.
[0353] 19. Burns, A. R. and K. Guillemin, The scales of the zebrafish: host-microbiota interactions from proteins to populations. Curr Opin Microbiol, 2017. 38: p. 137-141.
[0354] 20. Douglas, A. E., Simple animal models for microbiome research. Nat Rev Microbiol, 2019.
[0355] 21. Melancon, E., et al., Best practices for germ-free derivation and gnotobiotic zebrafish husbandry. Methods Cell Biol, 2017. 138: p. 61-100.
[0356] 22. Cantas, L., et al., Culturable gut microbiota diversity in zebrafish. Zebrafish, 2012. 9(1): p. 26-37.
[0357] 23. Rendueles, O., et al., A new zebrafish model of oro-intestinal pathogen colonization reveals a key role for adhesion in protection by probiotic bacteria. PLoS Pathog. 2012. 8(7): p. e 1002815.
[0358] 24. Caruffo, M., et al., Protective Yeasts Control V. anguillarum Pathogenicity and Modulate the Innate Immune Response of Challenged Zebrafish (Danio rerio) Larvae. Front Cell Infect Microbiol, 2016. 6: p. 127.
[0359] 25. Perez-Ramos, A., et al., beta-Glucan-Producing Pediococcus parvuius 2.6: Test of Probiotic and Immunomodulatory Properties in Zebrafish Models. Front Microbiol, 2018. 9: p. 1684.
[0360] 26. Girija, V., et al., In vitro antagonistic activity and the protective effect of probiotic Bacillus licheniformis Dahb1 in zebrafish challenged with GFP tagged Vibrio parahaemolyticus Dahv2. Microb Pathog, 2018. 114: p. 274-280.
[0361] 27. Lin. Y. S., et al., Dietary administration of Bacillus amyloliquefaciens R8 reduces hepatic oxidative stress and enhances nutrient metabolism and immunity against Aeromonas hydrophila and Streptococcus agalactiae in zebrafish (Danio rerio). Fish Shellfish Immunol, 2019. 66: p. 410-419.
[0362] 28. Qin, C., et al., EPSP of L. casei BL.23 Protected against the Infection Caused by Aeromonas veronii via Enhancement of Immune Response in Zebrafish. Front Microbiol, 2017. 8: p. 2406.
[0363] 29. Wang, Y., et al., Two highly adhesive lactic acid bacteria strains are protective in zebrafish infected with Aeromonas hydrophila by evocation of gut mucosal immunity. J Appl Microbiol, 2016. 120(2): p. 441-51.
[0364] 30. Chu, W., et al., Quorum quenching bacteria Bacillus sp. QSI-1 protect zebrafish (Danio rerio) from Aeromonas hydrophila infection. Sci Rep, 2014. 4: p. 5446.
[0365] 31. Declercq, A. M., et al., Columnaris disease in fish: a review with emphasis on bacterium-host interactions. Vet Res. 2013. 44: p. 27.
[0366] 32. Soto, E., et al., Genetic and virulence characterization of Flavobacterium columnare from channel catfish (Ictalurus punctatus). J Appl Microbiol, 2008. 104(5): p. 1302-10.
[0367] 33. Li. N., et al., The Type IX Secretion System is Required for Virulence of the Fish Pathogen Flavobacterium columnare. Appl Environ Microbiol, 2017. 83(23).
[0368] 34. Olivares-Fuster, O., et al., Adhesion dynamics of Flavobacterium columnare to channel catfish Ictalurus punctatus and zebrafish Danio rerio after immersion challenge. Dis Aquat Organ, 2011. 96(3): p. 221-7.
[0369] 35. van der Vaart, M., et al., Functional analysis of a zebrafish myd88 mutant identifies key transcriptional components of the innate immune system. Dis Model Mech, 2013. 6(3): p. 841-54.
[0370] 36. Stephens, W. Z., et al., The composition of the zebrafish intestinal microbial community varies across development. ISME J. 2016. 10(3): p. 644-54.
[0371] 37. Jacobson, A., et al., A Gut Commensal-Produced Metabolite Mediates Colonization Resistance to Salmonella Infection. Cell Host Microbe, 2018. 24(2): p. 296-307.e7.
[0372] 38. Chatzidaki-Livanis, M., M. J. Coyne, and L. E. Comstock, An antimicrobial protein of the gut symbiont Bacteroides fragilis with a MACPF domain of host immune proteins. Mol Microbiol, 2014. 94(6): p. 1361-74.
[0373] 39. Roelofs, K. G., et al., Bacteroidales Secreted Antimicrobial Proteins Target Surface Molecules Necessary for Gut Colonization and Mediate Competition In Vivo. MBio, 2016. 7(4).
[0374] 40. Russell, A. B., et al., A type VI secretion-related pathway in Bacteroidetes mediates interbacterial antagonism. Cell Host Microbe, 2014. 16(2): p. 227-236.
[0375] 41. Kamada, N., et al., Role of the gut microbiota in immunity and inflammatory disease. Nat Rev Immunol, 2013. 13(5): p. 321-35.
[0376] 42. Ganz, J., E. Melancon, and J. S. Eisen, Zebrafish as a model for understanding enteric nervous system interactions in the developing intestinal tract. Methods Cell Biol, 2016. 134: p. 139-64.
[0377] 43. Bates, J. M., et al., Distinct signals from the microbiota promote different aspects of zebrafish gut differentiation. Dev Biol, 2006 297(2): p. 374-86.
[0378] 44. Yan, Q., C. J. van der Gast, and Y. Yu, Bacterial community assembly and turnover within the intestines of developing zebrafish. PLOS One, 2012. 7(1): p. e30603.
[0379] 45. Costello. E. K., et al., The application of ecological theory toward an understanding of the human microbiome. Science, 2012. 336(6086): p. 1255-62
[0380] 46. Rogers, G. B., et al., Interpreting infective microbiota: the importance of an ecological perspective. Trends Microbiol, 2013. 21(6): p. 271-6.
[0381] 47. Burns, A. R., et al., Contribution of neutral processes to the assembly of gut microbial communities in the zebrafish over host development. ISME J. 2016. 10(3): p. 655-64.
[0382] 48. Hibbing, M. E., et al., Bacterial competition: surviving and thriving in the microbial jungle Nat Rev Microbiol, 2010. 8(1): p. 15-25.
[0383] 49. Shafquat, A., et al., Functional and phylogenetic assembly of microbial communities in the human microbiome. Trends Microbiol, 2014. 22(5): p. 261-6.
[0384] 50. Shade. A., et al., Fundamentals of microbial community resistance and resilience. Front Microbiol, 2012. 3: p. 417.
[0385] 51. Willing, B. P., S. L. Russell, and B. B. Finlay, Shifting the balance: antibiotic effects on host—microbiota mutualism. Nat Rev Microbiol, 2011. 9(4): p. 233-43.
[0386] 52. Brugman, S., et al., Oxazolone-induced enterocolitis in zebrafish depends on the composition of the intestinal microbiota. Gastroenterology, 2009. 137(5): p. 1757-67 e1.
[0387] 53. Salonen, A., et al., Comparative analysis of fecal DNA extraction methods with phylogenetic microarray: effective recovery of bacterial and archaeal DNA using mechanical cell lysis. J Microbiol Methods, 2010. 81(2): p. 127-34.
[0388] 54. Kunin. V., et al., Wrinkles in the rare biosphere: pyrosequencing errors can lead to artificial inflation of diversity estimates. Environ Microbiol, 2010. 12(1): p. 118-23.
[0389] 55. Darwish, A. M. and A. A. Ismaiel, Genetic diversity of Flavobacterium columnare examined by restriction fragment length polymorphism and sequencing of the 16S ribosomal RNA gene and the 16S-23S rDNA spacer. Mol Cell Probes, 2005. 19(4): p. 267-74.
[0390] 56. LaFrentz. B. R., et al., Identification of Four Distinct Phylogenetic Groups in Flavobacterium columnare With Fish Host Associations. Front Microbiol, 2018. 9: p. 452.
[0391] 57. Bernardet, J.-F. and J. P. Bowman, The Genus Flavobacterium. Prokaryotes, 2006. 7: p. 481-531.
[0392] 58. Kunttu, H. M., et al., Virulent and nonvirulent Flavobacterium columnare colony morphologies: characterization of chondroitin AC lyase activity and adhesion to polystyrene. J Appl Microbiol, 2011. 111(6): p. 1319-26
[0393] 59. Suomalainen, L. R., M. Tlirola, and E. T. Valtonen, Chondroitin AC lyase activity is related to virulence of fish pathogenic Flavobacterium columnare. J Fish Dis, 2006. 29(12): p. 757-63.
[0394] 60. Olivares-Fuster, O. and C. R. Arias, Use of suppressive subtractive hybridization to identify Fiavobacterium columnare DNA sequences not shared with Flavobacterium johnsoniae. Lett Appl Microbiol, 2008. 46(6): p. 605-12.
[0395] 61. Shabgah, A. G., et al., Interleukin-22 in human inflammatory diseases and viral infections. Autoimmun Rev, 2017. 16(12): p. 1209-1218.
[0396] 62. Verschuere, L., et al., Probiotic bacteria as biological control agents in aquaculture. Microbiol Moi Biol Rev, 2000. 64(4): p. 655-71.
[0397] 63. Lemon, K. P., et al., Microbiota-targeted therapies: an ecological perspective. Sci Transl Med, 2012. 4(137): p. 137rv5.
[0398] 64. Garcia, J. C., et al., Characterization of atypical Flavobacterium columnare and identification of a new genomovar. J Fish Dis, 2018. 41(7): p. 1159-1164.
[0399] 65. Pham, L. N., et al., Methods for generating and colonizing gnotobiotic zebrafish. Nat Protoc, 2008. 3(12): p. 1862-75.
[0400] 66. Ha, S. M., et al., Application of the Whole Genomne-Based Bacterial Identification System, TrueBac ID, Using Clinical Isolates That Were Not Identified With Three Matrix-Assisted Laser Desorption/Ionization Time-of-Flight Mass Spectrometry (MALDI-TOF MS) Systems. Ann Lab Med. 2019. 39(6): p. 530-536.
[0401] 67. McDowell, E. M. and B. F. Trump. Histologic fixatives suitable for diagnostic light and electron microscopy. Arch Pathol Lab Med, 1976. 100(8): p. 405-14.
[0402] 101. FAO, The state of World Fisheries and Aquaculture, F.a.A. Organization, Editor. 2016, Food and Agriculture Organization of the United Nations: Rome.
[0403] 102. Ashley, P. J., Fish welfare: Current issues in aquaculture. Applied Animal Behaviour Science, 2007. 104(3): p. 199-235.
[0404] 103. Vadstein, O., et al., Microbiology and immunology of fish larvae. Reviews in Aquaculture, 2013. 5(s1): p. S1-S25.
[0405] 104 Kennedy, D. A., et al., Potential drivers of virulence evolution in aquaculture. Evolutionary applications, 2016. 9(2): p. 344-354.
[0406] 105. Embregts, C. W. and M. Forlenza, Oral vaccination of fish: Lessons from humans and veterinary species. Dev Comp Immunol, 2016. 64: p. 118-37.
[0407] 106. Perez-Sanchez, T., B. Mora-Sanchez, and J. L. Balcazar, Biological Approaches for Disease Control in Aquaculture: Advantages, Limitations and Challenges. Trends Microbiol, 2018. 26(11): p. 896-903.
[0408] 107. Cabello, F. C., et al., Antimicrobial use in aquaculture re-examined: its relevance to antimicrobial resistance and to animal and human health. Environmental Microbiology, 2013. 15(7): p. 1917-1942.
[0409] 108. Santos, L. and F. Ramos, Analytical strategies for the detection and quantification of antibiotic residues in aquaculture fishes: A review. Trends in Food Science & Technology, 2016. 52: p. 16-30.
[0410] 109. Santos, L. and F. Ramos, Antimicrobial resistance in aquaculture: Current knowledge and alternatives to tackle the problem. International Journal of Antimicrobial Agents, 2018. 52(2): p. 135-143.
[0411] 110. Brandt, K. K., et al., Ecotoxicological assessment of antibiotics: A call for improved consideration of microorganisms. Environ Int, 2015. 85: p. 169-205.
[0412] 111. Defoirdt. T., P. Sorgeloos, and P. Bossier, Alternatives to antibiotics for the control of bacterial disease in aquaculture. Curr Opin Microbiol, 2011. 14(3): p. 251-8.
[0413] 112. Tamnecki, A. M., et al., Benefits of a Bacillus probiotic to larval fish survival and transport stress resistance. Scientific Reports, 2019. 9(1): p. 4892.
[0414] 113. Verschuere, L., et al., Probiotic Bacteria as Biological Control Agents in Aquaculture. Microbiology and Molecular Biology Reviews, 2000. 64(4): p. 655-671.
[0415] 114. FAO and WHO, Report of a joint FAO/WHO expert consultation on evaluation of health and nutritional properties of probiotics in food including powder milk with live lactic acid bacteria. 2001. Food and Agriculture Organization of the United Nations, World Health Organization: Cordoba, Argentina.
[0416] 115. Tinh, N. T., et al., A review of the functionality of probiotics in the larviculture food chain. Mar Biotechnol (NY), 2008. 10(1): p. 1-12.
[0417] 116. Martinez Cruz. P., et al., Use of probiotics in aquaculture. ISRN microbiology, 2012. 2012: p. 916845-916845.
[0418] 117. Buffie, C. G. and E. G. Parner, Microbiota-mediated colonization resistance against intestinal pathogens. Nature Reviews Immunology, 2013. 13: p. 790.
[0419] 118. Stecher, B. and W.-D. Hardt, Mechanisms controlling pathogen colonization of the gut. Current Opinion in Microbiology, 2011. 14(1): p. 82-91.
[0420] 119. Olsan, E. E., et al., Colonization resistance: The deconvolution of a complex trait. J Biol Chem, 2017. 292(21): p. 8577-8581.
[0421] 120. de Bruijn, I., et al., Exploring fish microbial communities to mitigate emerging diseases in aquaculture. FEMS Microbiology Ecology, 2017. 94(1)
[0422] 121. Gomez-Gil, B., A. Roque, and J. F. Turnbull, The use and selection of probiotic bacteria for use in the culture of larvai aquatic organisms. Aquaculture, 2000. 191(1): p. 259-270.
[0423] 122. Xiong, J. B., L. Nie, and J. Chen, Current understanding on the roles of gut microbiota in fish disease and immunity. Zool Res, 2019. 40(2): p. 70-76.
[0424] 123. Hai, N. V., The use of probiotics in aquaculture. Journal of Applied Microbiology, 2015. 119(4): p. 917-935.
[0425] 124. Lazado. C. C. and C. M. A. Caipang. Mucosal immunity and probiotics in fish. Fish & Shellfish Immunology, 2014. 39(1): p. 78-89.
[0426] 125. Dierckens, K., et al., Development of a bacterial challenge test for gnotobiotic sea bass (Dicentrarchus labrax) larvae. Environmental Microbiology, 2009. 11(2): p. 526-533.
[0427] 126. Fiebiger, U., S. Bereswill, and M. M. Heimesaat, Dissecting the Interplay Between intestinal Microbiota and Host immunity in Health and Disease: Lessons Learned from Germfree and Gnotobiotic Animal Models. Eur J Microbiol Immunol (Bp), 2016. 6(4): p. 253-271.
[0428] 127. Yi, P. and L. Li, The germfree murine animal: An important animal model for research on the relationship between gut microbiota and the host. Veterinary Microbiology, 2012. 157(1): p. 1-7.
[0429] 128. Forberg, T., A. Arukwe, and O. Vadstein, A protocol and cultivation system for gnotobiotic Atlantic cod larvae (Gadus morhua L.) as a tool to study host microbe interactions. Aquaculture, 2011. 315(3): p. 222-227.
[0430] 129. Verner-Jeffreys, D. W., R. J. Shields, and T. H. Birkbeck, Bacterial influences on Atlantic halibut Hippoglossus hippoglossus yolk-sac larval survival and start-feed response. Dis Aquat Organ, 2003. 56(2): p. 105-13.
[0431] 130. Munro, P. D., A. Barbour, and T. H. Birkbeck, Comparison of the Growth and Survival of Larval Turbot in the Absence of Culturable Bacteria with Those in the Presence of Vibrio anguillarum, Vibrio alginolyticus, or a Marine Aeromonas sp. Applied and Environmental Microbiology, 1995. 61(12): p. 4425-4428.
[0432] 131. Forberg, T. and K. Milligan-Myhre, Chapter 6—Gnotobiotic Fish as Models to Study Host-Microbe Interactions, in Gnotobiotics, T. R. Schoeb and K. A. Eaton, Editors. 2017, Academic Press. p. 369-383.
[0433] 132. Vestrum R. I., et al., Emerging Issues in Fish Larvae Research, Y. M., Editor. 2018, Springer.
[0434] 133. Caruffo, M., et al., Protective Yeasts Control V. anguillarum Pathogenicity and Modulate the Innate Immune Response of Challenged Zebrafish (Danio rerio) Larvae. Front Cell Infect Microbiol, 2016. 6: p. 127.
[0435] 134. Perez-Ramos, A., et al., beta-Glucan-Producing Pediococcus parvuius 2.6: Test of Probiotic and Immunomodulatory Properties in Zebrafish Models. Front Microbiol, 2018. 9: p. 1684.
[0436] 135. Qin. C., et al., EPSP of L. casei BL23 Protected against the Infection Caused by Aeromonas veronii via Enhancement of Immune Response in Zebrafish. Frontiers in Microbiology, 2017. 8(2406).
[0437] 136. Rendueles, O., et al., A new zebrafish model of oro-intestinal pathogen colonization reveals a key role for adhesion in protection by probiotic bacteria. PLOS Pathog. 2012. 8(7): p. e 1002815.
[0438] 137. Declercq. A. M., et al., Columnaris disease in fish: a review with emphasis on bacterium-host interactions. Veterinary Research, 2013. 44(1): p. 27.
[0439] 138. Renier, N., et al., IDISCO: A Simple, Rapid Method to Immunoiabel Large Tissue Samples for Volume Imaging. Cell, 2014. 159(4): p. 896-910.
[0440] 139. Butt. R. L. and H. Volkoff, Gut Microbiota and Energy Homeostasis in Fish. Frontiers in endocrinology, 2019. 10: p. 9-9.
[0441] 140. Banerjee, G. and A. K. Ray, The advancement of probiotics research and its application in fish farming industries. Research in Veterinary Science, 2017. 115: p. 66-77.
[0442] 141. Hoseinifar, S. H., et al., Probiotics as Means of Diseases Control in Aquaculture, a Review of Current Knowledge and Future Perspectives. Frontiers in Microbiology, 2018. 9(2429).
[0443] 142. Rawls, J. F., B. S. Samuel, and J. I. Gordon, Gnotobiotic zebrafish reveal evolutionarily conserved responses to the gut microbiota. Proceedings of the National Academy of Sciences of the United States of America, 2004. 101(13): p. 4596-4601.
[0444] 143. Milligan-Myhre, K., et al., Innate immune responses to gut microbiota differ between oceanic and freshwater threespine stickleback populations. Disease Models &amp; Mechanisms, 2016. 9(2): p. 187-198.
[0445] 144. Rekecki, A., et al., Effect of germ-free rearing environment on gut development of larval sea bass (Dicentrarchus labrax L.). Aquaculture, 2009. 293(1): p. 8-15.
[0446] 145. Quesada, S. P., J. A. R. Paschoal, and F. G. R. Reyes, Considerations on the Aquaculture Development and on the Use of Veterinary Drugs: Special Issue for Fluoroquinolones-A Review. Journal of Food Science, 2013. 78(9): p. R1321-R1333.
[0447] 146. Olivares-Fuster, O., et al., Host-specific association between Flavobacterium columnare genomovars and fish species Systematic and Applied Microbiology, 2007. 30(8): p. 624-633. 40)
[0448] 147. Evenhuis, J. P., S. E. LaPatra, and D. Marancik, Early life stage rainbow trout (Oncorhynchus mykiss) mortalities due to Flavobacterium columnare in Idaho, USA. Aquaculture, 2014. 418-419: p. 126-131.
[0449] 148. LaFrentz. B. R., et al., Reproducible challenge model to investigate the virulence of Flavobacterium columnare genomovars in rainbow trout Oncorhynchus mykiss. Diseases of Aquatic Organisms, 2012. 101(2): p. 115-122.
[0450] 149. De Schryver, P. and O. Vadstein, Ecological theory as a foundation to control pathogenic invasion in aquaculture. The Isme Journal, 2014. 8: p. 2360.
[0451] 150. Fridley, J. D., et al., THE INVASION PARADOX: RECONCILING PATTERN AND PROCESS IN SPECIES INVASIONS. Ecology, 2007. 88(1): p. 3-17
[0452] 151. Zhu, J., et al., Contrasting Ecological Processes and Functional Compositions Between Intestinal Bacterial Community in Healthy and Diseased Shrimp. Microbial Ecology, 2016. 72(4): p. 975-985.
[0453] 152. He, S., et al., Antibiotic growth promoter olaquindox increases pathogen susceptibility in fish by inducing gut microbiota dysbiosis. Science China Life Sciences, 2017. 60(11): p. 1260-1270.
[0454] 153. Brugiroux, S., et al., Genome-guided design of a defined mouse microbiota that confers colonization resistance against Salmonella enterica serovar Typhimunum. Nat Microbiol, 2016. 2: p. 16215.
[0455] 154. Kim, Y. G., et al., Neonatal acquisition of Clostridia species protects against colonization by bacterial pathogens Science, 2017. 356(6335): p. 315-319.
[0456] 155. Little, A. E. F., et al., Rules of Engagement: Interspecies Interactions that Regulate Microbial Communities. Annual Review of Microbiology, 2008. 62(1): p. 375-401.
[0457] 156. Stecher, B., et al., Like will to like: abundances of closely related species can predict susceptibility to intestinal colonization by pathogenic and commensal bacteria. PLOS Pathog, 2010. 6(1): p. e1000711.
[0458] 157. Pérez-Sánchez, T., et al., Probiotics in aquaculture: a current assessment. Reviews in Aquaculture, 2014. 6(3): p. 133-146.
[0459] 158. Huber, I., et al., Phylogenetic analysis and in situ identification of the intestinal microbial community of rainbow trout (Oncorhynchus mykiss, Walbaumn). Journal of Applied Microbiology, 2004. 96(1): p. 117-132.
[0460] 159. Huyben, D., et al., Dietary live yeast and increased water temperature influence the gut microbiota of rainbow trout. Journal of Applied Microbiology, 2018. 124(6): p. 1377-1392.
[0461] 160. Spanggaard, B., et al., The microflora of rainbow trout intestine: a comparison of traditional and molecular identification. Aquaculture, 2000. 182(1): p. 1-15.
[0462] 161. Merrifield, D. L., et al., The current status and future focus of probiotic and prebiotic applications for salmonids. Aquaculture, 2010. 302(1): p. 1-18.
[0463] 162. Schaeck, M., et al., Vibrio lentus protects gnotobiotic sea bass (Dicentrarchus labrax L.) larvae against challenge with Vibrio harveyi. Vet Microbiol, 2016. 185: p. 41-8.
[0464] 163. Boutin, S., et al., Antagonistic effect of indigenous skin bacteria of brook charr (Salvelinus fontinalis) against Flavobacterium columnare and F. psychrophilum. Veterinary Microbiology, 2012. 155(2): p. 355-361.
[0465] 164. Seghouani, H., et al., Walleye Autochthonous Bacteria as Promising Probiotic Candidates against Flavobacterium columnare. Frontiers in Microbiology, 2017. 8(1349).
[0466] 165. Araujo, C., et al., Inhibition of fish pathogens by the microbiota from rainbow trout (Oncorhynchus mykiss, Walbaum) and rearing environment. Anaerobe, 2015. 32: p. 7-14.
[0467] 166. Brunt, J. and B. Austin, Use of a probiotic to control lactococcosis and streptococcosis in rainbow trout, Oncorhynchus mykiss (Walbaum). Journal of Fish Diseases, 2005. 28(12): p. 693-701.
[0468] 167. Mohammadian, T., et al., Administrations of autochthonous probiotics altered juvenile rainbow trout Oncorhynchus mykiss health status, growth performance and resistance to Lactococcus garvieae, an experimental infection. Fish & Shellfish Immunology, 2019 86: p. 269-279.
[0469] 168. Pérez-Sánchez, T., et al., Identification and characterization of lactic acid bacteria isolated from rainbow trout, Oncorhynchus mykiss (Walbaum), with inhibitory activity against Lactococcus garvieae. Journal of Fish Diseases, 2011. 34(7): p. 499-507.
[0470] 169. Lemon, K. P., et al., Microbiota-targeted therapies: an ecological perspective. Sci Transl Med, 2012 4(137): p. 137rv5.
[0471] 170. Li. N., et al., The Type IX Secretion System Is Required for Virulence of the Fish Pathogen Flavobacterium columnare. Appl Environ Microbiol, 2017. 83(23).
[0472] 171. Sato, K., et al., A protein secretion system linked to bacteroidete gliding motility and pathogenesis. Proc Natl Acad Sci USA, 2010. 107(1): p. 276-81.
[0473] 172. Boirivant, M. and W. Strober, The mechanism of action of probiotics. Curr Opin Gastroenteroi, 2007. 23(6): p. 679-92.
[0474] 173. Wang, C., et al., Beneficial bacteria for aquaculture: nutrition, bacteriostasis and immunoregulation J Appl Microbiol, 2019.
[0475] 174. Wang, Y., et al., Two highly adhesive lactic acid bacteria strains are protective in zebrafish infected with Aeromonas hydrophila by evocation of gut mucosal immunity. Journal of Applied Microbiology, 2016. 120(2): p. 441-451.
[0476] 175. Evenhuis, J. P. and B. R. LaFrentz, Virulence of Flavobacterium columnare genomnovars in rainbow trout Oncorhynchus mykiss. Diseases of Aquatic Organisms, 2016. 120(3): p. 217-224.
[0477] 176. Bartelme, R. P., et al., Draft Genome Sequence of the Fish Pathogen &lt;span class=&quot;named—content genus-species&quot; id=&quot;named-content-1&quot; &gt; Flavobacterium columnare &lt;/span &gt;
[0478] Strain MS-FC-4. Genome Announcements, 2018. 6(20): p. e00429-18.
[0479] 177. Vergin, K. L., et al., Screening of a Fosmid Library of Marine Environmental Genomic DNA Fragments Reveals Four Ciones Related to Members of the Order&lt;em&gt;Pianctomycetaies&lt;/em&gt. Applied and Environmental Microbiology, 1998. 64(8): p. 3075.
[0480] 178. Yoon, S.-H., et al., Introducing EzBioCloud: a taxonomically united database of 16S rRNA gene sequences and whole-genome assemblies. International Journal of Systematic and Evolutionary Microbiology, 2017. 67(5): p. 1613-1617.
[0481] 179. McDowell, E. M. and B. F. Trump. Histologic fixatives suitable for diagnostic light and electron microscopy. Arch Pathol Lab Med, 1976. 100(8): p. 405-14.
[0482] 201. Aronesty E. Command-line tools for processing biological sequencing data. ea-utils [Internet]. 2011. Available from: https://github.com/Exprescion Analysis/ea-utils.
[0483] 202. Bankevich A, Nurk S. Antipov D, Gurevich A A, Dvorkin M, Kulikov A S, et al. SPAdes: a new genome assembly algorithm and its applications to single-cell sequencing. Journal of computational biology: a journal of computational molecular cell biology. 2012; 19(5):455-77. Epub 2012/04/18. doi: 10.1089/cmb.2012.0021. PubMed PMID: 22506599; PubMed Central PMCID: PMCPMC3342519.
[0484] 203. Sung-Min H, Chang Ki K, Juhye R, Jung-Hyun B, Seung-Jo Y, Seon-Bin C, et al. Application of the Whole Genome-Based Bacterial Identification System, TrueBac ID, Using Clinical isolates That Were Not Identified With Three Matrix-Assisted Laser Desorption/Ionization Time-of-Flight Mass Spectrometry (MALDI-TOF MS) Systems. Ann Lab Med. 2019; 39(6):530-6. Epub 2019/11/01. doi: 10.3343/alm.2019.39.6.530.
[0485] 204. Konstantinidis K T. Tiedje J M. Genomic insights that advance the species definition for prokaryotes. Proceedings of the National Academy of Sciences of the United States of America. 2005; 102(7):2567-72 doi: 10.1073/pnas.0409727102.
[0486] 205. Forberg T, Arukwe A, Vadstein O. A protocol and cultivation system for gnotobiotic Atlantic cod larvae (Gadus morhua L.) as a tool to study host microbe interactions. Aquaculture. 2011:315(3):222-7. doi:https://doi.org/10.1016/j.aquaculture.2011.02.047.
[0487] 206. Declercq A M, Haesebrouck F, Van den Broeck W, Bossier P, Decostere A. Columnaris disease in fish: a review with emphasis on bacterium-host interactions. Veterinary Research. 2013; 44(1):27. doi: 10.1186/1297-9716-44-27.
[0488] 207. Olivares-Fuster O. Baker J L, Terhune J S. Shoemaker C A, Klesius P H, Arias C R. Host-specific association between Flavobacterium columnare genomovars and fish species. Systematic and Applied Microbiology. 2007; 30(8): 624-33. doi: https://doi.org/10.1016/j.syapm 2007 07 003.
[0489] 208. Elsabagh M, Mohamed R, Moustafa E M, Hamza A, Farrag F, Decamp O, et al. Assessing the impact of Bacillus strains mixture probiotic on water quality, growth performance, blood profile and intestinal morphology of Nile tilapia. Oreochromis niloticus. Aquaculture Nutrition. 2018; 24(6): 1613-22. doi: https://doi.org/10.1111/anu.12797.
[0490] 209. Rawls J F, Samuel B S, Gordon J I. Gnotobiotic zebrafish reveal evolutionarily conserved responses to the gut microbiota. Proceedings of the National Academy of Sciences of the United States of America. 2004; 101(13):4596-601. doi: 10.1073/pnas.0400706101.
[0491] 210. Bates J M, Mittge E, Kuhlman J, Baden K N, Cheesman S E, Guillemin K. Distinct signals from the microbiota promote different aspects of zebrafish gut differentiation. Developmental Biology. 2006; 297(2):374-86. doi: https://doi.org/10.1016/j.ydbio.2006.05.006.
[0492] 211. Chatzidaki-Livanis M, Geva-Zatorsky N, Comstock L E. Bacteroides fragilis type VI secretion systems use novel effector and immunity proteins to antagonize human gut Bacteroidales species. Proceedings of the National Academy of Sciences. 2016; 113(13):3627. doi: 10.1073/pnas. 1522510113.
[0493] 212. Bernardet J-F. Bowman J P. The Genus Flavobacterium. In: Dworkin M, Faikow S, Rosenberg E, Schleifer K-H, Stackebrandt E, editors. The Prokaryotes: Volume 7: Proteobactena: Delta, Epsilon Subclass. New York, NY: Springer New York; 2006. p. 481-531.
[0494] 213. Loch T P. Faisal M. Emerging flavobacterial infections in fish: A review Journal of Advanced Research. 2015; 6(3):283-300. doi: https://doi.org/10.1016/j.jare.2014.10.009.
[0495] 214. Lowrey L. Woodhams D C, Tacchi L, Salinas I. Topographical Mapping of the Rainbow Trout (Oncorhynchus mykiss) Microbiome Reveals a Diverse Bacterial Community with Antifungal Properties in the Skin. Appl Environ Microbiol. 2015; 81(19):6915-25. Epub 2015/07/26. doi: 10.1128/AEM.01826-15. PubMed PMID: 26209676; PubMed Central PMCID: PMCPMC4561705.
[0496] 215. Rendueles O, Ferneres L. Fretaud M, Begaud E, Herbomel P. Levraud J P, et al. A new zebrafish model of oro-intestinal pathogen colonization reveals a key role for adhesion in protection by probiotic bacteria. PLOS Pathog. 2012; 8(7):e1002815. doi: 10.1371/journal.ppat. 1002815. PubMed PMID: 22911651; PubMed Central PMCID: PMC3406073.
[0497] 216. Boirivant M, Strober W. The mechanism of action of probiotics. Curr Opin Gastroenteroi. 2007:23(6):679-92. doi: 10.1097/MOG.0b013e3282f0cffc. PubMed PMID: 17906447.
[0498] 217. Wang C. Chuprom J. Wang Y, Fu L. Beneficial bacteria for aquaculture: nutrition, bacteriostasis and immunoregulation. J Appl Microbiol. 2019. Epub 2019/07/16. doi: 10.1111/jam. 14383. PubMed PMID: 31306569.
[0499] 218. Aronesty E. Command-line tools for processing biological sequencing data. ea-utils [Internet]. 2011. Available from: https://github.com/ExpressionAnalysis/ea-utils.
[0500] 219. Bankevich A, Nurk S, Antipov D, Gurevich A A, Dvorkin M, Kulikov A S, et al. SPAdes: a new genome assembly algorithm and its applications to single-cell sequencing. Journal of computational biology: a journal of computational molecular cell biology. 2012; 19(5):455-77. Epub 2012/04/18. doi: 10.1089/cmb.2012.0021. PubMed PMID: 22506599; PubMed Central PMCID: PMCPMC3342519.
[0501] 220. Segata N, Bomigen D, Morgan X C, Huttenhower C. PhyloPhlAn is a new method for improved phylogenetic and taxonomic placement of microbes. Nat Commun. 2013; 4:2304. Epub 2013/08/15. doi: 10.1038/ncomms3304. PubMed PMID: 23942190; PubMed Central PMCID: PMCPMC3760377.
[0502] 221. Stamatakis A. RAXML version 8: a tool for phylogenetic analysis and post-analysis of large phylogenies. Bioinformatics. 2014; 30(9):1312-3. Epub 2014/01/24. doi: 10.1093/bioinformatics/btu033. PubMed PMID: 24451623; PubMed Central PMCID: PMCPMC3998144.

1-18. (canceled)

19. A method comprising administering to a fish in need thereof, a probiotic active ingredient(s), wherein the probiotic active ingredient(s) is(are) a bacterial strain or combination of bacterial strains, wherein the bacterial strain or at least one bacterial strain of the combination is selected from the group consisting of: a Chryseobacterium massiliae strain, a Chryseobacterium massiliae strain wherein one or more virulence factor coding gene(s) and/or antibiotic resistance gene(s) is(are) deleted or inactivated, a Flavobacterium sp. strain whose genome has at least 95% or more Average Nucleotide Identity (ANI) with SEQ ID NO: 1 or which has at least 95% ANI with the Flavobacterium sp. strain identified by Accession Number No. I-5481 deposited at the CNCM on Jan. 24, 2020, and a Flavobacterium sp. strain whose genome has at least 95% or more Average Nucleotide Identity (ANI) with SEQ ID NO: 1 or which has at least 95% ANI with the Flavobacterium sp. strain identified by Accession Number No. I-5481 deposited at the CNCM on Jan. 24, 2020 wherein one or more virulence factor coding gene(s) and/or antibiotic resistance genes is(are) deleted or inactivated.

20. The method of claim 19, wherein the bacterial strain(s) is(are) associated with acceptable carrier or delivery vehicle(s) within a single composition or separate compositions comprising a mixture of distinct bacterial strains.

21. The method of claim 20, wherein the bacterial strain(s) is(are) further associated with adjuvant component(s)

22. The method of claim 19, wherein:
a) when only one bacterial strain is used, said bacterial strain is administered to a fish in need thereof without acceptable carrier or delivery vehicle(s), or
b) when a combination of distinct bacterial strains is used, said bacterial strains are administered to a fish in need thereof:
i) as separate bacterial strains without acceptable carrier or delivery vehicle(s), or
ii) as a mixture of distinct bacterial strains found within a single composition, or
iii) within distinct compositions each comprising at least one bacterial strain, or
iv) as a collocation of at least one individualized bacterial strain and distinct composition(s) each comprising at least one bacterial strain, and when a combination of distinct bacterial strains is used, said bacterial strains are administered to a host in need thereof simultaneously or separately in any order, or sequentially in any order.

23. The method of claim 19, wherein bacterial strain(s) is(are) selected from bacterial strain(s):
whose genome has at least 96% or more Average Nucleotide Identity (ANI) with SEQ ID NO:2 or which have at least 96% ANI with the Chryseobacterium massiliae strain identified by Accession Number No. I-5479 deposited at the CNCM on Jan. 24, 2020, and/or whose genome has at least 96% or more Average Nucleotide Identity (ANI) with SEQ ID NO: 1 or which have at least 96% ANI with the Flavobacterium sp. strain identified by Accession Number No. I-5481 deposited at the CNCM on Jan. 24, 2020, respectively, and/or
that comprise(s) a 16s rDNA sequence with at least 97% sequence identity to a 16s rDNA sequence present in a Chryseobacterium massiliae strain whose genome comprises SEQ ID NO:2 or a strain identified by Accession Number No. I-5479 deposited at the CNCM on Jan. 24, 2020, or a Flavobacterium. sp strain whose genome comprises SEQ ID NO:1 or a strain identified by Accession Number No. I-5481 deposited at the CNCM on Jan. 24, 2020, respectively, and/or
which is(are) from the group consisting of: a Chryseobacterium massiliae strain whose genome comprises SEQ ID NO:2 or a strain identified by Accession Number No. I-5479 deposited at the CNCM on Jan. 24, 2020, and a Flavobacterium sp. strain whose genome comprises SEQ ID NO:1 or a strain identified by Accession Number No. I-5481 deposited at the CNCM on Jan. 24, 2020, and/or
which is (are) variants of any one of these strains, wherein one or more virulence factor coding gene(s) and/or antibiotic resistance genes is(are) deleted or inactivated.

24. The method of claim 19, wherein the at least one bacterial strain(s) is(are) administered to:
a) a host that is a teleostean fish, or
b) hosts comprising or consisting essentially of or consisting of homogenous or mixed population(s) of fishes, for example a population(s) encompassing fishes such as rainbow trout at distinct stages of their development or growth.

25. The method of claim 24, wherein the host is a rainbow trout or a larva thereof, and when the host is a mixed population of fishes, it is a population encompassing rainbow trouts at distinct stages of their development or growth.

26. The method of claim 19, wherein the combination additionally comprises at least one another bacterial strain of the indigenous microbiota of the treated fish species.

27. The method of claim 19, wherein a composition consists essentially of at least one bacterial strain, preferably a live bacterial strain or susceptible of being revitalized and an acceptable carrier or delivery vehicle(s).

28. The method of claim 19, wherein said method:
a) prevents or minimizes infections by Flavobacterium columnare in the host fish or treated population of host fishes, or enhances the resistance against Flavobacterium columnare of the treated host fish or treated population of host fishes and/or
b) prevents or controls diseases caused by Flavobacterium columnare pathogen infections, in the treated fish species or treated population of host fishes, and/or
c) increases the lifespan of treated host fish or population of treated host fishes, or reduces the mortality of treated host fish or population of treated host fishes.

29. The method of claim 19, wherein said method prevents or minimizes infections caused by a Flavobacterium columnare pathogen or diseases caused by infections due to a Flavobacterium columnare pathogen.

30. The method of claim 29, wherein the disease is the columnaris disease.

31. The method of claim 19, wherein the at least one bacterial strain(s) is(are) administered to a teleostean fish or a population encompassing a teleostean fish selected amongst: eels (Anguilla sp.), salmonids (Oncorhynchus sp. and salmo sp.), tilapia (Oreochromis sp.), hybrid-striped bass (Morone chrysops × M. saxatilis), walleye (Stitzostedion vitreum), channel catfish, cetrachids (such as largemouth bass (Micropterus salmoides)), bait minnows (Pimephales promelas), goldfish (Carassisu auratus), carp (Cyprinus carplo) and aquarium fish (tropical fish species such as black mollies (Poecilia sphenops)) and platies (Xiphophorus maculatus), in aquaculture settings or fish husbandry settings.

32. The method of claim 19, wherein said method prevents or mitigates a rainbow trout fish disease in aquaculture settings or fish husbandry settings when a pathogen has been detected in the aquaculture settings or fish husbandry settings.

33. The method of claim 32, wherein the rainbow trout fish disease that is columnaris disease has been detected in the aquaculture settings or fish husbandry settings.

34. The method of claim 19, wherein the bacterial strain(s) or combination of bacterial strains is(are) introduced into the fish environment or introduced into the fish commensal microbial community by administration of encapsulated bacterial strain or combinations thereof.

35. The method of claim 19, wherein bacterial strain(s) or combination of bacterial strains is(are) administered to a host in need thereof in a dosage ranging from, or equivalent to, 5×10⁴ cfu/mL to 5×10⁶ cfu/mL of bacterial strain(s).

36. A probiotic composition or food product comprising at least one bacterial strain selected from the group consisting of: a Chryseobacterium massiliae strain, a Flavobacterium sp. strain with at least 95% or more Average Nucleotide Identity (ANI) value with SEQ ID NO:1 or with the Flavobacterium sp. strain identified by Accession Number No. I-5481 deposited at the CNCM on Jan. 24, 2020, and variants thereof wherein one or more virulence factor coding gene(s) and/or antibiotic resistance genes is(are) deleted or inactivated, and further acceptable carrier or delivery vehicle(s).

37. The probiotic composition or food product of claim 19, wherein the at least one bacterial strain is selected from bacterial strain(s):
1 whose genome has at least 96% or more Average Nucleotide Identity (ANI) with SEQ ID NO:2 or which have at least 96% ANI with the Chryseobacterium massiliae strain identified by Accession Number No. I-5479 deposited at the CNCM on Jan. 24, 2020, and/or whose genome has at least 96% or more Average Nucleotide Identity (ANI) with SEQ ID NO:1 or which have at least 96% ANI with the Flavobacterium sp. strain identified by Accession Number No. I-5481 deposited at the CNCM on Jan. 24, 2020, respectively, and/or
that comprise(s) a 16s rDNA sequence with at least 97% sequence identity to a 16s rDNA sequence present in a Chryseobacterium massiliae strain whose genome comprises SEQ ID NO:2 or a strain identified by Accession Number No. I-5479 deposited at the CNCM on Jan. 24, 2020, or a Flavobacterium. sp strain whose genome comprises SEQ ID NO:1 or a strain identified by Accession Number No. I-5481 deposited at the CNCM on Jan. 24, 2020, respectively, and/or
which is(are) from the group consisting of: a Chryseobacterium massiliae strain whose genome comprises SEQ ID NO:2 or a strain identified by Accession Number No. I-5479 deposited at the CNCM on Jan. 24, 2020, and a Flavobacterium sp. strain whose genome comprises SEQ ID NO:1 or a strain identified by Accession Number No. I-5481 deposited at the CNCM on Jan. 24, 2020, and/or
which is (are) variants of any one of these strains, wherein one or more virulence factor coding gene(s) and/or antibiotic resistance genes is(are) deleted or inactivated.

38. A method to identify bacterial strain(s) that are probiotic against a pathogen infection, comprising the steps of:
a) providing a germ-free trout model that is susceptible of being infected, with adverse effect on its health condition, by at least one determined pathogen, the latter of which does not infect a conventional trout with adverse effect on its health condition,
b) determining the microbiota of the said conventional trout of step a),
c) exposing the germ-free trout model to the at least one determined pathogen of step a) after reconventionalization of the germ-free trout model through inoculation of the germ-free trout with either the microbiota determined in b) or with the most represented bacterial strain(s) of said microbiota identified in b), when identified,
d) measuring the probiotic effect of the microbiota or the most represented bacterial strains thereof.

The application's sequence listing, which the Patent Office published only in electronic form, follows.

SEQUENCE LISTING (14 sequences)

SEQ ID NO: 1 - DNA, 5342333 bp, Flavobacterium sp. (residues 1-1,780,778 of 5,342,333)
  misc_feature (1)..(10): Whole genome sequence of Flavobacterium sp. bacterial strain with Accession Number No. I-5481 deposited at the CNCM on January 24, 2020 (UGB 4466)
  misc_feature (13753)..(13851): n is a, c, g, or t
  misc_feature (749614)..(749623): n is a, c, g, or t
  misc_feature (862940)..(863039): n is a, c, g, or t
  misc_feature (899105)..(899114): n is a, c, g, or t
  misc_feature (1197031)..(1197128): n is a, c, g, or t
  misc_feature (1435433)..(1435531): n is a, c, g, or t
  misc_feature (1958084)..(1958183): n is a, c, g, or t
  misc_feature (2393366)..(2393465): n is a, c, g, or t
  misc_feature (2989436)..(2989533): n is a, c, g, or t
  misc_feature (3448526)..(3448623): n is a, c, g, or t
  misc_feature (3525681)..(3525779): n is a, c, g, or t
  misc_feature (3751461)..(3751555): n is a, c, g, or t
  misc_feature (4214851)..(4214949): n is a, c, g, or t
  misc_feature (4574523)..(4574622): n is a, c, g, or t
  misc_feature (4634982)..(4635078): n is a, c, g, or t
  misc_feature (5147970)..(5148068): n is a, c, g, or t
  misc_feature (5289451)..(5289460): n is a, c, g, or t
gtattttggtagtataaactaaacaaaatctaaccaaatgagagtctatttattaattatgttgtttttcagcggaatatcttttgcgcagaattcaattaccggttctgtgactgatggcagtaaacaagctattccgggagccaatgttgtcgtagttggaagttcaaacggtgcttctaccgatttcgatggtacatttaagttaaatacttcggcaaagctgccttttacaattaaggtttcggctgtaggtttcgagtccaaaacaattaatgttacatcagtaaatcaaaagattaatgtaattttaaaagatgaggaaaccaaattaaatgaaattgtggtttcggcttcgagaactcctgagagagtacttgagtctccggtaactattgaaagaatgggaattcaggatatcaagaaaactgcttctccttctttttacgatggactggaaaatttaaaagaggtacagatgaataccagtagtatgtcttttaaatcaatcaatactaggggttttgcaacggtagccaatacgcgttttatgcagttggttgatggtatggacaactcctctccgcttttaaactttgtattggggaatttgattggtgtttcagagatagatgttcagagtgtggagttgttgccaggtgcatcttctgcattatatggagccaatgcttttaatggaattatgttcatgaacagtaaaagcccgtttacgtatcagggagcatcagcttattttaaatacggaatgacttcgcaggaagctgccggtaccaataattactacgattttggaatgcgatttgcacatgcgtttaataaatattttgcggccaaagcaaattttacttatatggaggctaccgattggtatgctacaaattataatgacaaaacaattcccggaatcgatagaagtaatatcaattatgatggaattaacgtgtatggtgatgaagtttcgactaacttaaaaggtgttggacagtcattagctgccttaggaattattcctgcttcagctgtaaatttattgcctagtaaaaatgtcagcagaacgggttataatgaagtagatcttacgaacaacaaagctggaaataccaaaattgatttttcattacacggaaggccttttggagatgatagattggaaatcatctggcaaagtaaatttggtaccggtaacgcggtttatcaaggagctaatagatactacttaaatgatttttttatgcaacaacataaaattgaatttaaagggaggaattttttcgtaagagggtatactacatcggaagatggagggcattcttatgatatgggttttaccggaattaatataaatagaaaatggaaagatgataaaacctggtttggtcagtatgcaggggcatacgttcaggctactttaggaggagccactccggaacaggctcatgtagcaggaagaaccacagcagatactggtcgtttcttgccaggtacagccgcatttaaaaatgcattcaatcaggtaattgatgacgaaagtgtacttacaggttcaaaattggtagacaattcgaaaatttaccattcagatgcaaattacaactttaaagatttgataaagtttgctgagattcaggtgggtggatcattcagattgtacgaattaaattctcatggaagaatttataccgatggtaacggtgggattaattatacagagtatggtgcttacacacaagtaatgaaaaagtttttggatgaaagattgaaatttacaggttctattcgttacgataaatctaaaaatttcgatggtaatttttcaccaagagtatcttttgtctattccggaggggagaaaaagaatcataatttcagagcttcattccaaaccggttttagaaacccgtctacacaggatcaatatataggttttaatattggtaatgcagtgttgattggttctgctccggacaacttattgcgttatacagagacattacctgtttcaacaactgcaggtcaggcttttgccggaggttctaccgttgtaatgaccggggtcaatgcttataataattcgtatactgccagttctgtagctgcttttgctgctttggcaggaactaatcccgtggctgctgctgctcttttaagaaaaacaaatataaattatgtgagaccggaagaagttaaggcatttgagttaggatatcgttcttttatcaatgatgtttcagtcgatcttaatgcttattataatgtttacaatcattttattgggaatttgaacgttgcggctcctttttatggtacagcgcaagatgctccaaaccctttattaggacctacagatcctggattccagacgcttcatgcgcttcagaatggaaacatcagagcgtaccagttgtataccaatacagatgttgaaatcaaatcgttcggatttggagttggtctttctaaaaaagtgattgctaattttgaattgggagtaaattataattatgctcagtttgatttcgatcaggccaaagatccaagttttgaagccgggtttaatacgccaaaacacagagttaaagtgtctcttggaaatgacaagttgtttgagaacttcggattcaatgtgagcggaagatggaataatgaatacaaatgggaatcaacttttgcagatggtgtaattaaggcggcaactgtaattgatgcgcagattaattacggacttccgaaattaaaatcacttttcaaattaggagcttccaatattggaggaaaagaatatgctcaggtacttggtgcaggatatatcggtcagcaatattttgtttcctggacgatcaatccgtaatttgggataatagacgaaacaaaccttttattcgcttttccggatacaatattcagaaaaggataattataaaatatagtagatcatggtaaaaaatttaaaatggctgtttttggtttcagtaacctttatggcttgtaatagtgatgatgcggtaacggtctcagattcgtctgatggacagccgttaacttcgggacaggcgaatttttcaaaatatgttgcgttgggagattcttttgcggcaggtttttcagacaatgctttgtttaaggctggtcaggcaaatgcataccctaatattttggcacagcaatttgcattgataggtggcggtacttttacgactccttttatggccgataatattggagggttttcctccggtggtgttcaggtacctagtttaggagttaggttgtatttagatgtatcaacaagtactccggttcctgttagtggtgtttcgggtaccgatattagcgcacgtttaacgggagctttcagtaatttgggaattcctggagcaaaagcaacacatttggcgctagctggttatgcaagtgctaatccttattttggcaggattgcttcttcgccttcagcaacggttttaggtgatgctttggcacagaatcctacttttttctctttgtggattgggggtaacgacgttttaggttacgctacatccggaggagacggatcaaatccgattacagccccggctacttttgatgctgtttataaaaacctggcaacagaattgtctaagaatggaagaaaaggtgttgtggccaatttgccggacatcagtaccttgccgcactttacaacagttccttacaatcctttaacgatttctgttttaggtggtggaagtacggctgttggaacggcaacgatcaatgcacttaatacacaattatacggtccgttgaaaagcgccttaaattttcttggagttacggatagaattgatttactatcgctaactgcagcaaatcctttgttgataaaagacgaaacgcttgccaacttatcgactcagcttactgcagtgcttacgccatcggtgggagcacagactgcggcattttatggtactgtttttggacaagcgcgtcaggctaaagctaccgatttggtgcttttgagtacaagagcagctattggaacggcacctacagcagcaaactcaggaatcggaatggtgcctcctgctccgttggataaatttgggattacgtatccgttacaagataagtatgtattaattccggcagagataacggagatcaaaaatgctactgcggcctataatttaaccattaaagcagctcaggaggcaaacggtctggcattagtagatgcagacggattgatgaaacagttgtctactgcaaacgggatctctgtaaatggctatactttgacaagcgcatttgttttcggaggagtgttttctctggatggtgttcatccttcagccagaggttatgcatttattgctaataaatttatagagtcaattaatgcaaaatacggttcaaatctaaaaggagtagatgtcgggaattaccagacactttatcctaaagttataaattaaatttaattttttcataaaacagccacttgctttcagaacgcagtggctttttttatgcagttaaaaaatgctgttttcggtatttgagggctgacttttaagaatcaaacaaaatcgtagtattttttataaaaaaaatattgattttatattttaaaaatttatctttgcgctctgaaaaaagaggtattttcgataaacctaaatagctatttaataaatacataagtaatgtcaaaagtaataggaaaagttgctcaaatcattggaccagtagttgacgtagttttcaacggtaaagatgttgaacttccaaaaatttatgattcattagaaatcacaaaaaaagatggaacattattagttcttgaagtacaatctcacattggtgaaaacactgttcgtacaatctctatggactctacagacggtttgtcaagaggatatgaagtagttggaactggaaatccaatccaaatgccaatcggtccagacgtatatggacgtttattcaatgtaattggagacgcaattgatggtttaggcgaattgccaaaaactggagaaaacggtttgtcgattcacagaccagctcctaaattcgaagatttgtcaacttcatcagaagttttattcacaggtattaaagtaatcgatttgatcgagccttacgcaaaaggaggtaaaattggattgtttggtggtgcaggtgttggtaaaacagtattgatccaggagttgatcaacaatatcgcaaaaggtcatggtggactttcagtattcgcaggagtaggagaaagaacacgtgaaggaaatgacttacttcgtgagatgttagagtcaggaattattaaatacggtgatgatttcatgcactctatggaaaatggaggatgggatttatctaaagtagatatgccaggaatgagagagtctaaagctactttcgttttcggacaaatgaatgagccacctggagctcgtgcacgtgtagcactttcaggattatctatcgctgagtatttccgtgatggagcaggaactgatcaaggtaaagacgtattgtttttcgttgataacatcttccgttttacacaagcaggttctgaggtatcagcacttttaggacgtatgccttctgcagtaggataccaaccaactttggcaacagagatgggagctatgcaagaacgtattacttctacaaacaaaggatctattacatctgtacaggcggtttacgttcctgcggatgacttaactgacccggcaccggcaacaacgtttgctcacttagatgctacaactgtattgtctcgtaaaattgctgagttaggtatttatcctgcggttgacccgttagattctacttcaagaattttgactcctcaaatcttaggaaatgagcattatgactgtgcacaaagagtaaaagaaattcttcaaaaatacaaacaattgcaagatatcatcgcgatcttaggtatggaagaattgtctgaagaagataaattatcagtatcaagagcacgtcgtgttcagcgtttcttatctcagccattccacgtagcggagcaatttacaggtattcctggagtattggttgatattaaagatactatcaaaggattcaacatgattatcgacggtgagttagatcatcttccagaagcagctttcaacttgaaaggttctattcaggatgctatcgaagctggagaaaaaatgttagctgaagcttaatctagttttcagtattctgtcgcagtaatcagtactgagactgtaaactgagactgtaaactaaaaaaaaatgattttagatatagtatcaccagaagcaaaattattttcaggagaagtaacatcagtaacgttgcctggggttgatggaagtttccaaatattgaataatcacgctcctatcgtctctattttggaaaaaggaactgttaaaattgcttctgcaaagtttaatttttctaaagatgtagcgagtaaattcacaaaagtaaacgagcaaacttatacattagagattgcatcaggtactgttgaaatgaaagataataaagtaattgttttagttgactaaagcagtttcggaataaatagaaaaagacttcaagtaattgaagtcttttttttatgctctaatttttctttttgactacaggaagatatggtattcaaagagtatttaaacgatttatctccaattggggttgtgaaagcaaagcaatagcttattttacaatcaattttataactttgcttttatgaaattaccggagaacctgaatcagaaattagagatacgaaagcaaaataattcgcttagaaaattaccggtttttagtaaccgaatagatttttcatcaaatgattatataggcttttcaaaatcagaatctatttttaagttaactcatacttatttgctggaaaacgaaatttttcaaaacggcgcaaccggatcacgattgatctcaggaaatcactctttatatcaaattacagaaacgtttattgcggaatttcatgacgctgaatcggcgttaatctttaattcgggttacgatgccaatgttggtttttttagcgctgtaccgcaaagaaatgatgttatattgtatgatgagttaagtcatgcttctattcgggatggcattacaatgtctaatgcaaaatcatataaattcaatcacaatgattttgaagatttagaacgtcttattcaaaaatttccggatactacggtttatattgttactgaaacggttttttctatggatggggatagtcctaatttagaagaattagtagtcttgtctgagaagtacaattgttatctggtagttgatgaagcgcatactttaggtgtatttggagaaaaaggggaaggtttgatgcaatatttgaaattgcatcatagaatttttgcccgaattatgactttcggtaagggcttaggatgtcatggagcaacagttctaggaagtacagctcttaaagaatatctcgtaaattttgccagaagcttcatttatactacaggtttatcacctcattctgttgcgacaatttttgtagcctacaaacaattggaagcagagaaagcaaccattgaaaagttacgcagtaatattgtgtttttcaatcagcacaaaaacctattagggctaaagccaatgtttgttcggagtaagtcggcaatacactcggctattgttccgggaaacgaaaatgtaaagcgcctcgcagaacaacttcagggtaaaggattcgatgtaaaaccgatactttctccaactgttccggaaggtcaggaacgtttgcgcttttgcattcatagttacaattcagaaaaagagattaacgaagttttagaattactgggaaacttcgtgttttaggataatatgtttcacagagattcaccaagttatcacagagcttcgcaaagttattttgtgaggctcttttttctttgtgaatctctgcgtgaaaaaaaatatttccgtcagccctttgtttgtggtcatttagaaaaaacttttaatttttttgtaacgttttgaatgtttgattacttacgagtcgtaatcaaataaaccaaaataattatgaaaacaacttcaacaccaattaccgaaaaagtactccattttgtatttgtctttgttgcttcggcggggctgggatatgctttagtaaatcaatttattttagataaacccaataaagaactacttctaattatgatttgtctcttcgttgcttcaatggctttctggcaaagaaaaaaaatataataaatcatagtacttattcaatcatcaatcaaactaaatcaaaacatcatcaatcattaaatcaatcaacaaaatgaaaaaattagttacatcagcacttgctgtaatcgcattagtttttagtggaacgacacaggcacagaacaaatctccagaacttgaaaattcgcttttatgggaagtgtcgggaaatggactgtcaaagtcatcttatttatacggaacaattcatgcgatatgctcaaaagactattttctatctgaaaaaacaaagaaggcatttgacgcttctactgaattagttttagaaattgatttggctgatccaaaagaaatggcagatatgcagcaaatggctatggggaaagagccgttaagtaagaaattgagtccgcaacaacttgcgaaattgggtgtaattcttgaaaaagcgaccggaatgacggtgaaacaagtggacgctttgagtctggctacagtaatgagtctgattgctgtcaaaagttttggctgtgatgatattaaattttatgaaatggagtttatcgagcaagctaagaaaagaaatatcgacatcggaggtttggaaacggtaaaaagccaagtgaaagtactcgagaatgcctatacagatgatgaattgcttaatatgttggaagggttaaatacttcgctaacatctgagtcagttgccttttataagactgaaaatataaagggattgtatggtgttacagttgatgaaaaaatgtcgagtgaaaaaacaaataagattatcttagacgatagaaatggcaattgggttaagaagatgccgcaattgatgaaaaatcagagtgttttttttgcagtaggatcggcacatttgggaggtgagtattcagtgtttaatttattaagaaaaggacggtataaggtaaaaccaataatgaattaagattattttgaaagagaaagaacaggaatttttaaatcggatcgaaagtcataaaggaatactgtacaaggtttccaagatgtacatggataatcctgacgatcaacaggatttgtttcaggaaattatctgccagctttggaaatcgtatgattcttttagaaatgaaagtcagttttcgacctggatgtatcgtgtagcggtgaatacagccattgtttttctgaaaaaagaaaagcgaaaggtagacaaatacgaaatcgcttccgaaaatattaaggatgatgaaggagattcgcacatcaaagaaagtcagatcgatcatttttataaagctgttcaaaaactcgaaaaaatagataaagcgatcattttttatcagctggaagggttttctcataaggaaattggagagaacttaggaatctcagaaggaaatgccagggtgaaattaaacagagcaaaagaaaaattaaaagaaataattaaaaatcagggatatggattttaacgatatacaaaacgcatggaacaatgataaatcggataatattgttcttccggataatctggaaaaaatacaatcggccaatacgccattagacagaatcagaaaaaatttaaaaagtgagctgattgcgcagggagtttcaatagtgttgataggatttacaccgtatatttttcattttgaacagaagtacatcgttccgttttttttgctttttgctatgtttaccgcggtttgtatttattatttgacaaaactttattttttctataaacgacttcataataccgctttaaaaacaaaggacaatctgtatgaaacttattttgatatccgtttgaatatggagttgtataagactttcggatttgctttgacaccttttatgattgtgtttttaacggttttaatctacgatcagacttccaaaaccaccaattttgttatgtttgactttagcagtacagaaataattggtgttttttcagctattcttttttcaattctttctatgggattgtttttggaatggtgggttcggttttattacggaaaatatgctaaagaaataaagaaagtgatagacgaattaaaagaagagtaagttaaatagaccccatcatacgtgatgggtttgtttttattggtatttttgcatcgattattaagcaggtattcatcgagaaaagattattcgataccagaaagcataattgttttttgtgagtatttgccaaacaaaagaagcatgaaaatatttataaccggaatttcaacagatgttggtaaaaccgttacttcggcaatcgttgttgaagctttagaggccgattactggaaacccgttcaggccggagatttggattttagtgatacacacaaggtaaaatctcaaatttcaaattcgaaatctcaatttttcccaaatgcatacgagttaaatacaccggcaagtccgcatctggcagcagaaatagatgggcttacgatcgatttgaagaagattatggaacctcgaactgataatcatttggttgtagaaggtgcagggggaatttttgttccgttgaatgaaaaggattccattatcgatctaattcaggccgattataaagtaattgtggtttcaagacattatttggggagtatcaatcacaccttgttaaccgtagaagcgattcagaacagaggttttgaagtggcaggaatcattttcagcggaagcgaaaaccaatcgactgaaagtttaattctgaataaaaccggaataaaatgtatcggaagaattgatgaagaaccttattttgatcaaaatgtaattcgagaatatgccgatcagtttagagagaacttacttaatttatagagaaaacaagacagaataaagaaaatagactttcttatctttgtcaaaattgtagagtttagactaatttctatactctaatatccatattctaaacaagatgacattaacagaaaaagacagccaatatctttggcatccttatacacagcataaaacagcacaggcgccaattgcaatttccagaggtgaaggtgctttactttgggatgagaacggtaaggaatatattgacgctattgcctcatggtgggtgaatccgtttggacacagtaaccgatttatagccgatgcgatttacaaacaattaaccacattagagcatgtgttgtttggcggttttacgcacgaaccggcagtcaaagtggcggagaaactaattgagattctgcctaaaaatcagcagaagattttcttttctgataatggttcaacagcggttgaagtagctataaaagtggctttgcagttttttttcaataagggtgaaaaacgtaccacaataattgcttttgaaaatgcttttcacggagacacttttgcggcgatggcagcaagtggaatctctttttatacacaagcttttcagggaatgtttattgatgtagtccgaattccggttccggtaaaaggacaggaacaggaaagttttgatgctttgagaaatgtgattcaaaatcatagttgcgccggttttatttttgaacctttggtgcagggtgcagccggaatggtaatgtatgaaccggaggctttggcaaaactgattcaaatctgcaaagagaacaatgttcttaccattgccgatgaagtaatgacaggtttcggtaagacgggaaaaacctttgcaatggattatgtgacagaagttccggatatgatgtgtttgtctaaagcactaaccggaggcacaattccgatggcaatcaccacttttacacaagaggtttttgatgctttttatgatgacgatatcaataaggctttgtttcatggacatacctttactgcaaatcctacgggttgcgctgcagctttggctagtattgaattgttgcatacagatgaaatgcaggctaatattgaaagaattcataagagtcatttggattttcagaagaaaattgaaaagcattcaaaagtaactaccgcgagaacattgggggttatttttgcagttgaaatcaaatcagattcagaagagagttattacggttcaatgcgaacgaaactctataatttcttcattgataaaggtgttgttttgcgccctgtcggaaatatcgtttatattttacctccgtatatcatgagtgatgagcagcttcaaaaagtatataaaaccattgaagaagccattgaaatggtgtaattttgcgattaaataaaatattttgaatacacaaaaaatctctataacagctttttcttctatttcacctttaggaaataccacggaatcagtgtgggaaaagtatcttgatcgtcaacattgtttttcgaaacagtttttagaccaacaggaaacttctgtcgccgctctggatgctgagtctaaacaaattgtctcggaaataagagagtccgatcctaagtacaaatttctggatgattcggttttgtttgctttgacggcttctcggcaagcggttaagcaggcaggatggagttcggatgatatcttcggaattaacattggttcgtctcgaggagcaaccgatttattcgaaaaacattataaagaatacatcgatacaggaaaagcacaaactttagcttctccaacaacaactttaggaaatatatcttcctggattgctcacgatctgcagagtactggaccggaaatatcgcattctataacgtgttcaactgcacttcatgccttgttgaatggtgtggcgtggttgaaatcaggtatggccgataaatttttggtaggaggaagcgaagccccattgactgatttcacgattgctcaaatgagagcacttaaaatatattcgagaatcgatcaggaaacagaagcatggcccaacttggctttcgattttgagaaaactcaaaatactatgattttaggggagggtgcggcagtttgctgtctggaaaccggcgagaaagagaatgcaattgcatacataacaggtgttggttatgcaaccgagattttagaacacaatatttctatttctgcagaagcaacctgttttcaaaaatcaatgaaaatggctttaaggaatatagctcctgaatcggttgatgcaattgtgatgcatgctcccggaacgatcaaaggcgacttaactgagttgagggctattgaaaaagtttttggatctcagctgcctttgctgactaccaataaatggaagatcggacatacttttggagcgtccggtatattgagtttagagttggcacttttgatgtttcagcacgatacttttattggagtgcctttcggagaagagcaaaaacagacaaaatcgattaaaagaatattgattaatgccgtaggtttcggagggaatgcagttagcgttttgatcgaaaaaccataattgggactttcggagcctcataaatttacactataaaaaaatccattcgccacagcgaatggatttttttatagaacgnnnnnnnnnnnnnnnnnnnnnnnnnnnnnnnnnnnnnnnnnnnnnnnnnnnnnnnnnnnnnnnnnnnnnnnnnnnnnnnnnnnnnnnnnnnnnnnnnnngaattaacgaattaacgaattaacgaattaacgaattaacgaattaacgaattaacgaattaacgaattaacgaattaacgaattactgaaacagtacttttcgggtgacagtaaaatcatttgctaaagtgatcttcaccaataaaacctgattggctgacggtaaattttcaatttgaaaggtcgcactgtttaatttgttcttactgtataattgtttgccggtaatatcaaaaacaacaacttgtttaatgttttcttttgatgaagacatttgaatagttttattgctagtcgaaataagaatgccattttcgatgttttcaaaatctcctgtacctaaagttttgcctggtttatagcgcagtgtcaaacgttcggtaaaggtaccggcttcggttttaaaagtatagttgctttgtgttaaatcatgaacagtcccggttgttttgtcttcaatgtaaatggcttgattgctcatgtttccatctacttcgtcaattgccacagtaaaatcacctgcaactgttgtgcggtatcctaatggaacaagatcggcatctgtaaatggcagagcacgtccctgaattacatatttgtttttttgatccgtagtgtaaaaatctaaatattgattgccgtcaaaagttagtccgtcatatctgttttcatagtcattggttgctccttcaatgtagcttactagcaattgtttaaaagctcccgtggtattggtcatgtttaaccaaatgcggtgtttttctatagccgccacttttgaggtgtttccgggtctgaaaaactgaccgttattggctccgcccaatcgcattaaattgttgaacttcacttttcctgcagcattcgtcgttacaaaaaaggcttgcccggctgctatgttgcccgtcggtttagtgcctttgtcttttgcaggatcgttattgtgctgtttatccgattttgcagaaactcctccactaaggttgtatgaagcatagtcatccgcgctgtactgattacttggaacaggttttgcaggagtgttatgcgtccagaaatagagcgttccgtctaacattggattgtcttttaaaagcctatcagcacttagggcagacgggtacggatttccaatcaggtggcctttcattgcggttaggtattctccctctaaatctccattgtttggaattcctttgaaagttgtggtaaattcttgtttggttgcatttgtatagttcgaggggcctcgaataatgtagccttttccaacaatcatattgctttctctattggttcgtacccattgtgtaccgtcattgccataatacatagtggcaggcgtagaaggcgaaacgtctactaatttttgtggagttaccggagtagaccaatacaaataatctttttggaatataggcggactggtacggatgtatgaaatacttcccgtattcttagcattgcttttttgtatcaaactggaactgttttcaaaaactaaagatccggagtttacgtctatactattggcaatagttaaggtgtttcctgattttatagttactgttgctccattcatgattgtgcaggaacatccgttaagatctgtttctgcagtataatttcctgtaaattgaattggatcgtttaacgaaggtgttccacctgaccatttagtgccattccacacatttccgggtaggattacaatgtctgacgaatatactcttgtgcagttatcatcaatggcaaatttataagttccgggagctaatcctgaaatttcatatgtggttccggaagttgtataattgtagacagttcctcgtgactcgactaatcttcctgatgtaggtacattttctaaaacaacacttccgcttggggtagtacaggtaggttgtttgatcgttcctactgttggggcaatatttgcctgtttggttataatagcttccgaaattgcagtggttgccgttccgcagtttgatgttactaccgcatagtaatacaatgttcctgatgttgtggattgtggcgtgtaactattggttctagcgccatttgcagctcctaatgccgttccgtttgtggcagttgcagcagtattactgaaccattgataggttaaggttcctgatgctgtagcggtaaccgttaaaggtgtaaaggcatcgttgaggcatttggtttgagtagcggtagactgtgaggtaatttctaatgatgggttaaccgttagtttagcagtatttgagtttgtgttggtattggcaggacaagtggttgagcttcttgcgacacaacgaacatagtagtcactataggacaaaggaaggttggtcaaatttaaggttgctgtattatgacctgataccccctgaacgccattggtattagtccagtttgttgagccattggcagaatattgccattggtaggtcgcattcgaggctgatgcggttacgctaaaggtgccggattgaccttcgcaggcaactaaatcctgtggttgactggtgaacgttaatcctgcttgtacattgactgctatactgtttgaggcattgctaggacacatatagtctttattttgtgtaattaccgagtaggtacccgatgctgtaacccttatgcttctggtagtttgcccgtttgaccaaaggtagttgtcttcaatacttgaagtcaatactacactgcctccctggcaaaaagtagttggtccgcttgcggtaatagtaggtcttgacgtttttccgttagtgatattgacgtatttgtatatggcatcatttgttttacaatcgttagaggctacaacagtaagatttcctgcggttgagctggtagttacggtaatggagttggtatttgctcctgaggtaatagtccagccagaaggtactgtccatacatatttggtggcatttgttactggtggaatcgagtaaacttgccctgtatttcttggacattgtggtgaaaaacctgtgatttcgccagtttcacctaatgcttcgtaaactgttatctttttttgagaggttttaacagtagggcaatttggctgtgttatcgtataaatgacgtttgcaactccgggagcttttgcaatggcattggcgcctccgtcacttttagtaacaacttcgagaactgatggatctgatgaggaccaggttcctccgctccatcctccggcggcccagaacaattctgtagaacctacgcataatttactattattgctgctaaccgtgccaggagttgcattggaattgcattgcgcatttaaatgactgacgttgataaataggctaagagcaacgagtaatttaaagtaattttttggggcttcgaaagtgttttttatagctgaaaaaaagttgatttttctatcggaactaattttttttgacgaaagattaaaaggaaaggtaggtgttttaaaaagtaaagttttcttcatagtaggtgtattctatacaatttgttatgccggaacaggataattttttgccttggcaaagatagatacacatacgtgattggacatatgaaggttttcagaacgatcatttaatcgacaaaatgtcaaaatagtcgacgaaatacatctttaaaaatggtattttatgttatttcttataaatagtaattttaaagtataagaaaaatcgcaaaataacactcaaaatgatcctgtttttagaactataagcacaaaaaacgtcttttaagtaaaaaatttgcaagaaaattgaatgtgcgagtgtagtgattttgacgaaaaaaatcaaaaagtaatgaggttaagcccgtgatttttgtgggctagaattctttctcaagcaaagtaactttatcgtaaacaagaaaactttcgtagccgcggcgaagcatatagtcgcagaatttttttcgtttttttaaggtgtttttttcggaaatgctattccagcatcgctcagaaagctggtcgaaagtggcttcgtattcctcgatagtaatttcttttaaagcaagcgtaatattagccgacgaaatttgttttgctttcagttcattggtaattcgaattctgccccaatgtttcatgcgatgtttgcctctggcaaagctgcaggcaaatcgggtttcgtttagaaagttagtttcaatcaattgaaccacaatagtatcgatttcatcggcagtcatttttaggctgtacagtttggataccacttcggcatgacagcgctcctgataagcacagtagtgttctaacttcagtaaagcctctttgggagtgcaaattgaattcatggcttttttctttctttttaacgattacggctaaaaatagtcatttaaatgttaaaatcacaactattttttttgtttttctcagaaaagtcttttgttaaaatgttgtatatgtggggaattataatatttttgtacacaaaattaacagttttttatgaccttgtaaaacagggttttagcttttagttttaaaacaaagtataaaaaacaactcctgaatttaatagggagtatttttttgtgttttgttgcccaaaaacaaatttaatcataaataccactttcatatgattcaaaaattacttttgagcgttcgctctgtatttttaaaattttctgatccccaggccagaaaaacttctaatcccgttatcaaattagcctgtctgggaatgtttttggttatgaatttggggtatgggcaaacagtaacctgggatggctggagtggggatggaaactggaatacaccaacaaactggagtaccaattctgttccaacaggtacaagtaatgttgtaatacctagtttagcaagtcaaccgataatttcaagtgcaaatgcgcaatgtaataatattacaattagttctggagctactcttacagtgaatcgaaattttacagttaatggctctgccactatttctggtacaataagctttgcttcaacaaatagtaccgcaagaacgattatatttagaggtgcagtaactttaaacaatggatcaatatggggtgaaccttcgtcgggaaacggagcaaataatagctatacatttgctgataatttagtcaataatgcaacatcttttaatgccgtaggaacgacgggaattcatacttttagtggagcatctaaaacattcagcggatcaacaacaactataattcctttagtgtctattacgggtacctatactaataattccgcttttgctgtcgcaaatgtactttctgggaatggaacattgattaattcatcaagtggtacactcacgattggagggacgtcgacaataagtactactcttgctaatgcaggaactttaaaccttaatggctcgtctggatctacaacaacgaattttacaaatactggtacaatcaatgttaatggttctaattcaattgcatctattaataatagctcgcagttaaatattagtgcctctccagttccaactattaccactttaactgcgacatttgctggtaatacagtcgactatagtggaggagctcaaacaataaaggcaaattcttatacaaatcttaccttatcgggaagtggtacaaaaacatttccttcagctggtgttactgcttcaaatgttctgactattggcaatggcatagtggctaatttaagtactgctacacataccgtaaaagctttagttctcggagaagtaaacaggccgtcaggaacttgggggagctcttcttcaagtgcagcaaatcagaatgatttatacttttccgcagtaacagggatcatcactgtatctacttgcgcgggggcggcaccgacgccttataatgtaacaggtgcaggaggagcattttgcagctcaaatgccggttcttcaatcggtttgtctaactcgcagactaattgccgttatcaattagtaagaggtaacgtggccgtgggttcaccaataacgggcacaggtgcagcaatcaattttggaacgtttaataatacgggattgtatactgttatggcgacaaatacaacatcattgtgttctgccgtaatgaataattctgtaaatatttatcgctacagttcaccaccggttcctactgcaacggttgtaaatgtttcttgtccgggtgaagccacaggaagcatcacagttacgaatgctgttgccccggcttctgctaattttgttagtgcaaacaatcagggaattgatttaaacgcttctttgttatctaacagaacagcctttactttagaaggatggattaaatttgataagaccaaatacatagcaaggatggcactttttggtcaaaatgatattattgaagttggttttgagggtaataatcttagattctggacaactcgtggaacggtggatttgcccttatcttcatttcctgcaggatatacatggaatcacatagccgtgacagctgatggtagttcgatgaaaatttatttaaatggaggagatcctatttcaactacagtaagtgctaccaattatgggagcaacagcaatacaacaaaaatgggatacggggttatggacaatgccggagtgggtttaaccggtgaaatctttaaattgggagtttggaacagggcattgactgggacagaaatttctactttagcgtcagggtttgtagattatgatgcatcacaaaatgggttacttgccggttatagttttaatgaaggcaccggttctacattatatggtgttggtagtgccgcaacgaatggaactttgatagggagtccttctccggtatggacagatccttatacgtattcatggacttctactcctcccggatttacttccagttcaaagaatttaacaggagtaccaaatgggacttataatttaacgacctctctaacaacctgtacaaattcaggttcatggacagtaaacgcaactaatttaacaacagcgattacaactcagccatcagctgcaactacctgtgtgggtaataatgcagcatttagtgttgctggcacaggaaccagtttaacttataaatggcaggttagtactaatagcggatcaactttcagcgatttatccaacggtggagtttattcgaatgttacttcagcaacgatgaatatcacttctgctatcgctacaatgaacaattatcaatatcgttgtattgttggaggtgcctgtccatcagttacatcaaatgcagtaacgcttacagtgaattcggctatgccggcgccagtcgtaggtactgtgacgcagccaacctgtaccgttactttcggtagtattgccttaagcggattaccttcgggaggaactttaacaagatcacctggagcagtagctgtaccttatacaggaacgacggtaacagatactaatcttgcggcaggaacctattcgtacgccgttgcaaatggtccttgttcctcaatttcgactacaggaattgtaattaatccggttccgacagcaacctatggtgcgagtggatgggataacactgcaactatagataagaaacttatttttaactccaattttacttcaataggagatgtgagcggatgtacctgtgaagtcaattcaggtgcaaatgttgtaataggagtgggacataccttgaagattgccaatgaggttaaagtacttagtggtggtacgatgacttttaaaaatacagcaagtttagtacaaaccaataacgttaccaatacaggcgatattacttatgagcgtaccacgcctcctatattgctaaaagattatgtgtattggtcaactccggttagccctcaacgattggtcgatctttcgtctttaacgcctagcactatgtattacggtttcgatggtacacaatgggttcgaacgaatagaactgataatatggtggtaggtaaagggtatattattcgtgctccatccaattattcgaatagctctaagacagcctatccggcaagttttaaaggagttccgaacaatggaaatatcgaaacagaaatgttggcttcaggaaaaagttatttgatagggaatccttacccgtctgctttaagcgcagagaggtttgtttcagagggcatagaagggtttataaaaacaaatgaaaatgtaataaatggtaccctttatttctggacacacaatacaccggcaaaacctgttccaagtaatcagtacagtgcggatgattatgcttcattcaatttgactggaggaacagcggcgagatcggatgtagattttggttcaggaggcggtgttaaaccaactggagaaattgcggctgggcagtcattttttctaacgactaaggctgcaggaaaaatattgtttactaacgcaatgcgattaggggcaacagataacggtcagttttttagacctgctaatacctcaagaagaactactgttgaaaagaaccgtatttggttaaacatgactagtacaaccggggccttcaaacaattattgttagggtatatagaaggtgcaaccaacaattatgaaaccctgtatgacgggttaagtcttgatggtaaccagtatttggatttttacagtgtaagtgatgcaaataaatttgtaattcagggacgtgcggtaccttttacagatgctgatattgttcccttaggttaccgaactgctgttgcaggcgattttacaattgcaatagacgaggttgatggtaaaatgaccaatcagaagatttatgttgaagataaagtaacgggagttattcacgatttaacacaaagcaattatacttttaaaaccgaggtggggaacttttctgaacgtttggtattgcgttacaccggtaaaactttaggtgtcggagattttgaaaaccttaaagacgggattttagtttctataaaagacaaagtaattgcggtacaatcttcgcaggaaaatattaaagaagttatagtgtatgacgtgtcaggaaaaatgctttaccataaaaagaaagtaggtaatacagaattacaaattcaaaacctgccatcagccaatcaggttttattggtgaagatcactttagcaaatgattttactacgacaagaaaagttatttttcaataaattttaaataagagttcatttcaaaaaatccattccgtttttcggagtggatttttttttgtctaagaaaataaggtgtttaaaaaatcaccaaaattggtgattgtggattttatataagggttgtagttttaggccaaattatgatcaaagaaaaacttaagcccctagagttatgattaaaaaaatactttttttccttgttttggcagactgcttccatggttcgatacttttagctcaacaaggtaatacaatgcaaaacggaaactgtcctgttgcagccggtgttacaatttgtgaaggaggttcaggttttttaaccgtttcatctacctgtgctgcggttgcccaaacccctgtaactgccaaaggtagcggaggaatatcgaatagcatagtttatggtgatcgtgcaaatacagacattaccataaatgttccttcgttaccggcgggggcaatagtaacgtctacaaatgttacgataagttttaaggcaaatggtgtttcttttagaaatgagttgagggttaaggcaacacccccaacagcagttggagcagttcagagtgatttgaaccctgttcctacactcgatagtccagggacttcaactaatgtgccattaggaatatggggtactgggaacccatccggaacttgggtatttgcatttagagagtcctttcttgatgtttttgtaaatactgatgcaaatattacaaacattaccattagagttaattatgttttgctggaagtagactggtatacatcagcctctggaggaacaaaaattggttcagggatttcgtttaatccggtaggcgttagcggttcaggccttatggataccaatactgcgggtacaactccttattatgcggcttgtaccaataatcctgggtgtagaacaatggtaaattttgtgattaacaaagcttccgttgcaacgggggttacaatttgtcagggaggttcaggttcactaacggctccatttacttgctcaggagttgcagttgcccaaagccctatgattgcaagcggtagtggtgggacagtaaaaagcaccgtttacggaggttccggaaacacagatattagtataattttcccttcattacctgttggagctgttgttactagtaccaatgctactataagttataatacaataggtagttcgtatttgaatgagttacgggttagaatacagccgccaactgcgatgggcacagtgctgaatgatataagtcccgtctctgctagtaatagagggagtgttatagatgttcctttagcatcttggggaaatacaaatccttcaggaagttggatatttcgatttagagaagatcatgatgatgatgaaaatccggatgctaatattacaaatattagcattacagttaattatacattaccggcaacagtagattggtatacaatggcttttggtggtaccaaaattggttccggagtctcgttcaatccggtaggtgttagtggttcaggtcttattgatactaacaccgtgggtacgactccttattatgcggtttgttccggtgattctccagtttgtagaacaaaggtgaattttgtaataaatgaagtcctgggaaaaccagtagtgggatccgttacacaaccaacctgtgttacggcttttggcagtattgctttaagcggacttcctactgggggaatcttaacgagatcacccggagctatcgtggtgtcttataccggaactgcggttacagatagtgatcttgcagcaggtacatatacctatacagctggaaatggaaattgtacatcgttggcaacttcggatattgtgattaatcctttatcagtagcgacttataataagggtatttggagcactgctccaaccatagacaaaaaacttgtttttaactctgattttacttcgacaagtgatgtaaacggatgcttttgtgaagttaattccggagcaaatgttgtaatcgggggtggaaatactctggccattgcgaatgatgttaaagtatttacaggaggtgcaatgaactttaaaaatacagcaagtttagtacaaaccaataacgttaccaatacaggtgatattacttatgagcgtaccacgcctcctatattgttaaaagattatgtgtattggtcaactccggtaagccctcaaacattagtgaatctttcacctttaacaccaagtacgatgtattacggtttcgatggcacacaatgggtgcaaacgaataaggctgataacatgatggttggaaaaggttatattattcgtgccccgtcaaattattcgaatacttctaaggctgcctatcaggcaagttttaaaggagtcccaaataatggaaatatagaaacggagcagctggcttccgggaaagcttatttaataggaaatccttatccgtctgctgtaagtgcagatgatcttattgctaatgcagcaaataatgctgtaataaacggaacactttatttttggactcataatacggctgcggtatctacactgacaaatcagtatacgagcaatgattatgcttcttacaatcttagcggcggagtatcggcaaaatcagatcctggttataatagtgatcgagtgtttgataaaggtatgaaaccaacaggcaagatagcggccggacaagctttttttgtgactactaaagcagccggaaaagttctttttaccaattcaatgcgactggggacagcagataatggtcagttttttagatctgtgaatccgaaaaaagaagctgcgattgaaaagagccatgtctggttaaacatgaccagtgcaacaggcgcttttaagcaattattggtggggtacatacagggggcaactaatgattatgatagtaattatgacgggttaacttttgatggcaacaaatatttggatttctatagtatcagtaatgagaataaacttgtaattcagggacgtgcggtaccttttacagatgcagatattgttcctttaggttaccgaactgccgttgcaggtaattttacaattgcaatagacgaggttgatggtaaaatggccaatcagaagatttatattgaagataaaacaactggagttattcatgatttaacacaaagcagttatacttttaaaactgaggtgggaaacttttctgaacgtttggtattgcgttacaccggtaaaactttaggtgtcggagattttgaaaacctgaaagacgggattttagtttcgataaaagacaaagtaattgcggtacaatcttcacaggaaaatattaaggaagttgtggtatatgatgtgtcaggaaaaatgctttaccataaaaagaaagtaggtaatacagaattactaattcaaaacctgccatcatccaatcaggttttattggtgaaggtagctttggcaagtgattttacaacaacaagaaaagttatttttcagtaaattttaaataagagttcatttcaaaaaatccattccgttttttggagtggatttttttgtgtttaagaaaataagatgtttaaaaaaatcaccaaaattggtgattgtggattttataaagagtgtctatttttgcgttaattcttgttaaaatttaacatcttaactttcaattttgataaaaaaagtgcttttttttctgattttgacgaactattttcatagtacgtggctttacgcggaacgagggaaagcagctgttttttttagcacgattgattatagaaaaaaaggtaatacagtgggaagggaatttttacaatccgacaaaaaaagctgtacgctaagccttaatcaaactttatgtcgatatttaatcggtgtgcaactgcgtagcagtacagcaaatgattgtgtaaatggaattggttttaataaggttgtatttctaaaaggcgaaaaattaaaaatacagaaccattcaaaacagggggggtattcattttctattgaccgggaaacttttaatgaacgttttgtgctgtctgatattgaggaaactttagcaagcaacagtttttcggaggaaaatccggacgtatttatttcggtagaggatagaattattaaagtcatttcaactcaggatataatcactcaaataactgtttttgatattttgggcaaaccactgtatagaaaagaaaatattgaaaatctggaatttcaactgccaaaattcaattcttatcatcaggttttaatagtgaaaattaaatttggagacgggaaaataatgacaaggaaaattttgctttaaatgactgtcttaaaggaataatcgttttttatcatcttaaatatatatagcataaatcgccatatttactggtaaaatactgtttctgatcatattgaaaaagttataagtgttaaattctcacaattaaatcgaaaatatttagttttaatgtaaataaaatcgtaccttggttattgctttacgattgaaatacttaaaagcctgttaagttaatttttatcattttctattgaagcttataaatagagtgtctatactctttacctgcctaaaatactgattgctaatttaaatgccccgattaaatgaaacaaaaagtactcttcacttcaacatttcacttgtactatcaggattagtctatcctgtttcggcgttttattttttgaggtatttagaaattactttaatcagattctcgtctgattgaaaagttatgtttttaaatattaaaaaataccacgatgagaaaatttttacttacacttcagttatttgcattgcctttatttttttatgcacagactaaaacagtctctttctcggcaacaggaacaacaaatttaactacgagttttgtgattccggccggttcaacatctttaacaattagtgcctggggaggtggaggtgccggaggtggtacaactagtgccggattaagcttagaaaaaggagctgccggtggtggtggtggtgcttttgccggaggagtatatacaatttcgtcaggtgcaacaatctctcttaccgcaggtggtggaggtgttggaggtaccggagttaatggtcagacagggaaaacctctctggttacgggttttgtttctgctgtgggcgggggtggcggtacagccaatacatcgggaggtactccggccaaaggagcgggaggtcttgcttcttcaagtgtgggtacaaatacatttgatggtggagcaggagtagacggacaaagtggtttaacagctgcttctggttcaggcggcaatggaggaaatggtggtggtgccggtggtgccggattttcatctttattgggtacagcggatggaaatccgggtacagttcccggcggaggtggaggtggagctaaaagttctattcttggggcagggaaagccggaggtgacggaggtccgggaagagttgttatctcatacgattgtgcagcttatagtctgaccagtacgagtgcttcagcggtaaatatctgttccggaacatcgtcaacgataaccctaaacggtactttaccggtaggagtatatagcgttgcttatcaggtagacggagtaactcagacgccggtaactatgactgtaagtgcaagtggaaccggtacttttacagctcccggattttcagctttaggaagtaaaagtctaacagttacctctttaacttctggaacaagtggcaatgctgccgataattgtgcttcaaccatcagtgccaataatactgcttcagtaaatgtaacgtcatccgggacagctcctgttgctttagcaggaaccggagcaacctgtacccagattacagcaaattggcaatctgtttcaggatcaacgtattacacattggatctttcgacagatattaattttggaagttttgttggaacctacaacggtttgaatgtggggaatgttttaacggtaaatatcacaagtttaagcaatgcgactacttactattacagagttcgagcatttaatgggacctgtttgagtgcttattcgaacaccataacttacaaacctgctgtttctccggggaatgttgttttgcaggcagccactaatacttcttgtacatcatttatggcaaattggagtgcggaagtcaatgcggtgagttatctgttagatgtctctcttgtaaatacatttgccactactgtctcaggatataatgcccttgatatcggaaatgtaacgacctatacagtgactggactgactgtaggtacaacctattattacagactcagatcaaagaatggttgtggaaccagtgctacaggtaccgcaacagtacaaaatataaccacatttacgcagccaggtacaccacttaatgatccggtggttcaacccacctgtgatgttcttaccggaactgtggttttaaagaatttgccaaacagaaatgattatacgattacgcaaaccggtacgttctcaaatacttattcgggaggagttggtgccgattggactaaatataccattacaggtctggctcccggtacttataatttcacagtacaatatccgggcacttgtgcttctttgtcattgtcgaatattgtcgtaaatgctttggcaacgaatacgtatacaattgcaggaggatggtcacttgggacgccaacgacaagccagaatattgtttttgcagatgatttttcttcgtccggagatgtgaatagctgtggttgtacgataaatgccggaaaaaaagtaaccataaatagttcaaatacgttaacagttaagaatgcattaattgtgaattcgggagcaggaacctctttgacttttaaaaccagttcaagtttggttcaggtgaatagtgcagttaattccggaaatatttcgtacgagagaacaagtcccggaattttaaaaaaggattatttatattggtccactccggtaaatccacaaagattaatcgacctttcgtccggaacatcagcaacaaagtattttggttacgatggtgcccaatgggtatctaccgacagaacaactaatatggtggtaggcaaggggtatattattcgtggtccggagagctattcgaatacggttaaaacaaccttcacaggaattttttcaggagttccaaacaatggaagtctggaaggagaatctttgagctcgggaaaaagttatttggtaggaaatccttatccatctgctttaaatgctgatgctcttataagtacaaatagtatactaggcggaacaatctatttttggacgcataatacgcctgtacaactaacctatacaaatcagtactcagccgatgattatgcttcttataatttaagtggaggggtttcagcaaagtcggatccattgcacagtgacattccggcaaatgataacggaattaaaccaacaggtaaaatagcagccggacaatccttttttgtgactactgtagcagcaggaaaagtacaatttaacaattcaatgcgagtaggtggagctaataacaatcagttttttagaactgaaagggcatctaaggaagttactttggtgaaaaaacgtatctggttaaacatgagcaatacgactggagctttcaaacagttgctggtaggatacatagagggggcgactaatgaatatgatagtaattatgatgggattagttttaatgctaacccttatctcgatttttttagcgtggcaaacggaaacaattatgtcattcagggtagagctttaccttttgtagatactgatattgttcctttaggatatcgtacgacaatcgcgggtgattttactatttcaattgatgaggtagatgatagtatgaatgaacaggctatttatatcgaagataaaacaactggggaagttcataatttaaaacagagcaattatacgtttacaaccgcagtcggaaccttctcagaccgattagtgctgcgttataccggaaaaacattaggaacagacgattttgaaaatgcaaagaatgctattgtggtttctgttaaaaatagaataataaatgtgtcgtcaaaagaacagcttaaagatgtttttgtttatgatgtgtcggggaaactgcttttcaataaaagtaaaattgggaataaagagtttcaaatacaaaatttaacaccaggtaatcagatggtactggtaaaagtgattttggaaaatgatgctacaggaacacgaaaaatagttttttagaaataaaaagaatgctcttaagaggttttttgcagattttcattggtattccggatggctttttcatttttatagtcaatccatttttgacctttgaatttacgcatcatgatatcgaaatagcgcataataaaaacattgtaaaaggctttggacaggttggtaatgtttttaggaaaagctctcagactcatcgaaaagcccggggttaaatatttcatgtaatgccagtatccttcaggcatgtacagcatttcgccatgttttaaattggtaataaatccctgtgcatttttaagagcaggaaatttttcatagtcaggattgtcaaaatcaatgtcttctcttgaaattaaggcatgtggtaccttgtacatgtatttggattgatcgggagcaaaaagcatgcactgtttttctccgtgaaaatgaaaatgtaaaatattggagtagtcaatatcataatgcatgaacacccgtgcattttctccgccaaaaaatagcattggcatttgtttcaccaaattcaagccaatatccggccataaaaagtcttcttttaatagcggaacttctttcatcagattataaagaaaaatacggtagttcgttggttttgattccagaagatgaatgtaatcactcattttcatagtggtatgagcttcgttaaaaccatcttcatgatttacaggtctgtcatcgtatagaggaacgatactatttccggcgatttcgttgatataagataatttccatttgtgataagctggccagtcttcggtcaattcttcgacaactacaggaatttgatttttcacatactgggaaataaaatcagcctttgagattttttttaccctttcgatttgctttaacttcatctctattaaataaaaaaattgcttataacacatgttataagcaatttagaaatatttatcgagatttaggaactctttttcttaaatttttgatttggccgtagcttcaagatttctttcaatagtgtgtcctggtcttgaccattttggtttttctcctagaggaacgaactgagaatcagctgcttcaactgttttaggttgtgaaacttttgtaaatggcttttgtggattcaatcctaacatttcaaacatcttcatgtcttcatgaacatcagggtttggtgtcgtaagcagtttatcacctgcaaaaatagaattggcccctgcaaaaaagcacattgcctgtccttcacggctcatgttagttcttcctgctgacaaacgaacctgtgtatccggcattacaattcttgtagtggcaaccatacggatcatttcccaaatttcaactggtttttcctcttccattggagttccttcaacagctaccaaagcattaattggcacagattccggttgagggtttaaagtagaaagcgctacaagcattccggctctgtcttcgatactttctcccattccaatgattcctccactgcaaacggtaacattcgttttacgaacattctcgatagtttgcaaacggtcttcgaaaccacgggttgaaataacatctttataatattcttcagaagtatctaaattgtggttgtaagcatatagacctgcttcagccaaacgctgcgcctgattttcggtaatcatacctaaggtacagcaaacctccatgtcaagtttgttaatggtacgaaccatctctaaaacctggtcgaattcttcaccatcttttacatttctccaggcagctcccatacatacacgtgatgatccactggattttgcacgtaaagcctgtgctttaacctggctaacactcattagatcgtttccttcaacacccgtgttataacgtgcagcttgtgggcaatacccgcagtcttccggacagcctccggttttgattgaaagtaaagtagatacctgaactacgttaggatcatgtttttgcctgtgaattgttgctgcttcatacagcaagtccatcataggtttattatatatggcaattatttcgtcttttgtccaattgtgttttgtaatgctcattgatgcagttttttgatgctccaaaagtagttaaatagttccaatcaaccaatgcccaatcctgtaaatgaatatttgacagctattttcaaaaaacaaacactctaaaatcatataattttaattttttatgattttagagtgctatttagtttgatttacttttaaaaattaatcggctgcatatttgttattccagtacagcatcatcatcaatgtaacgattactgatgaagcgattccttcaaaaagtaagcagatgcaataagttggtaccgaaggatttccgccaaacataaaagtttccgaaagtgtttttacataagcatctccaccccgggcataactgtaaacgagcagtccaaaaacacttaatgctacacccactacagaggtagccattgctgagactgcatttgatacaaaattagtttcaccttcatgaagattcattcgcatggttttattcacgccgtaaaatataaaaaagacatttagggttcgcagatagaataaatgagctaaacctaatacgttcatcaataaaaagtaaattccaattccaaggaaaatcagaaaaccgttggtaatttctttaggtaatttcataatggttatttttaaagaagttaatagcaaatatttgataaacagagttctatatcaaatttactaaaaaaataactacgatgatttaaaaagggtaaaaagtatgtcaggcgacattgccctaaaaaagaaacgatgaattttttattgtaacacttagaaacataggtctaagtgtctaaaaatgggaagctaagaaggaaagactttttttctggttaaaatgatttcaactcagaggttgaaagctattctaaattttgtttaaaaatgcgagagcattttttctgtccagatgcaattgttcttttaacaaatcgacagagccgaatttttgttcttccctcaggtattgtaataacgaaacctgaatttttttaccataaatatcggcatcaaaatcaaaaagattcacttcgatggtttgtttttgcccgtcaacagttggattaaaaccaatgttcatcatccccgaaacctctttttgatcgatcaaaacttttacgacgtatacgcctgctttaggaatcagtttatactcatcattaatttcgatgttagctgttggaaaaccaatagttcttcccagctgttttccctgaacaacttcaccggataaaaagtagtgatagcccagataatcatttgccaaagacatatttccttcgctgagtgctattctgattttggttgaacttacagaaacgtcctgaatttcctgagcggagatttgctcaacttcaaaaccgtattcatgaccgaaagcgattaaatcatcaatattggccgttctgtttctgccaaagcggtgatcatgaccaataattattttctggatatgaaactgatctaccaaaattgaatgtacaaactcttcagcggttagtctggagaaactttcgttaaaaggatgaatgatcagattttcaattccggttgcttccagaagctttgacttttcagtgatggtatttaaaagttttatttctgatttttcctgcagtaccattcttggatgaggaaaaaaggtaagcactaaactttcatactttccgttttcagtgttttgggtaatgcgttccagaatttttttatggccaatatgtacaccgtcaaaagttccaagagttaaaattgttttcttggttgactgaaaatcgtttatagaatgaaagagcttcaaaacaaataatttaagatggtgcaaatttatactattctattttaaatttaatgctaagcgtaattgattttttacgctccaactgttagtttttgtgaaaataggtcagtctataatttaaaactgtataattgtctctaataagtgtaagattttgatttaattcgcgtaattttgatatacttttatatttagaatatgaaaaaaaacctactttttttattttttactttttgctgtgctggtgtatatgcccaaaatgatggtttgtggcaaaaagttgatgctgtttcactaagcaaaagaggagttatgcctcaatcagggcgattgtactataagctgaattcagattttctgaaggctaaacttagtgttactactgctagaacagcaagaaatacttcgacagaaattacattccctaatgccggaggtgtactggaacgtttttcagtttgggaatcttctaattttgagcctgagttacaggcaaaatatccggaaatcagagcttatgaaggacgcggtttagacgacaagacggcgaagatttattttagtgtagcgccaattggggttcagacgatggtacttcgtacagataagccatcagaatatatcgagcaaaatcaggaagacaaatcgtcctatgttttgtttaccaaaaatgatgtagcttcaaaatctcgcttgacttgtaaaacaacagatgtattagcccatacaagtacttcacccaatactgcaaaatcggcagcaaacaataaagttttcaaaacctttagactggcactgtcttgtacaggtgaatacaccgcttattttggaggtacaaaagcaggtgcattggcaggaatgaatgctactttggcacgagtaaatgctgtttttaataaagacctcgctgtaagagtggtgttaattgccaataatgatgctgtaatttataccaatgggctaacagatccttattctaatccagatagaggaacctctaaagatccttcagatggtaatgattattggagcaaagaagttcaaagcactttaacgagtgtaattggagaagctaattatgatatcggacatttgtttggagcgtcaggaggaggaggaaatgcaggttgcattggctgtgtttgcgatagtccgacaccgtctgatgcaatggggaagggaagtgcttatacatcaccgtctgaccagaaaccggaaggtgatagctttgatattgattttgttgctcatgaaatgggacatcagtttggaggatatcatactttttcttttgatggatcagaaagaacaggcttaaatgttgaaccgggaagcggatcaactataatgggttatgcaggagtgtctaagggctatgatgttcagaatcattcagacgattattttgcttacgccagcattctgcaaatccagaatacgttgtctggaaagaattgtcccgttagtacagccatagcaaataatcctccggtagttgatgccggtgcagattatacaattccgattagtacaccgtttattttaaccggtactggttcagctgttactggtgtgacctatacctgggagcaattggatagtgcgtcgggatcatcaactgcaaacagcaatagtacagcctatcctgaaaaaccaaatggacctctatttaggtctgtacgtccggggaattcacttgttcgttatatgcccgacttgaacactgtacttttgaacaagttgaccacaacttgggaatcggtttcttctgttgcaagaacattgcattttaccctgactgcaagagacaatggtgcatcgggagttgcacagacgaatactgatacaatgattgcaacggtcgtaactagtgccggaccatttacggttacttcgcaaaatacagatgacgttagttggccaataggatcgaaccagactataacatgggcagtgaacaataccagtacactacagggatcttcgtcagtaaatatcaagctatcaacagatggaggtctgacatttccaataattttagcctcaaacacaccgaatgacggttcgcaaaccgttcagattccgaccagtgtaactgcttcaacaaattgcagacttaagattgaaccaacagcaaatatttattatgctttaaatagtaagtcgtttgcagtggggtatacttcaacgacaacttgtgattcttatagtttcgggaatgcttttgctattccttccggaaattcctttacttctaaaacggtaaatgtgccggcatcaaccgggacaatttccgatgtaaatgttttggttaatgtaacacacgataagctttcagatttcgaattgcaaatagtaaatccgcagggtacggtggttaatttatataatcgtaacagctgtggcggaataaattctactttggctcttcagtttgacgatgccggagttgctttagattgttccaaaactacaagtcagattgttgttccaattgatttattgagtgtgtttaacggtcaggatcctaaaggaacctggagttttagagttcgagatgcagtttcgggtaattttggaactataaattcagcttcattgaatatttgcaataaagcattttttttaggagagattgatattgaaaatgtagcgtttactttatacccgaatccgaacagaggaaattttaccattcagtttactagtgattcaatcaacagagttcaggtttatgtacacgatattcttggcagacaagtatattttaactcttttgataaaacgccttattttaatcaaaatattcaattagcaggagctacagcagggatgtacctggtgactgtaatagagggggagcgcagaacggttaagaaaatagtcctatactagagaaaagataaatttttgaaaaaaatccaaatttcaataactgctgttgttggagtttggattttttttgattggaattttatcttatgaatttgccattgccatacagacaatgctgattttggcaccgggaattttttgtaaagctctggaacaggcctcaagggtagcgcccgttgtcaatacatcgtcaacgattaaaaaatgtttgttgtgattttcattcgaaaatttgacgtcgaagatgttttcgatgctttcagatcttcctaaaagattttttttagattgggtttttgaatatttttttcgatacaataagcctgggtcaaaaggaattgccagacttttagataaagtggtgccaaaagtagtcacctgattataacctcgtttttttagttttttgggatgcagtggtacaggaatgattacatcaaaaggaatttttaaacgtaattcttttaaatcttcggcataccaattacctagaaaagtcccgatttcttcatgacctttgtatttgagattatggatcagttcctgaacaattccttttttgttgaaatacaaaaatgccgatgcatgctgcatgtcgattcttccataaaatttcttcacagcctcattttttggattcaaatggtattgagtaagaggtaattcgtggcgacaacgggtgcacaaaatagtttcaccactaagtaaaagggtgtgacatcctacacaaactttaggaaaaaagaggttgatgagataattaaacacaaatagaaagaatttagctataaaaataaccaaatcattgcttcaaactttattatttttcttttttttaaaagtactttttatatttttgcatcactatggcaaaacaagaagatttatttaagaatgtggtttcgcacgcaaaagagtacggatttatttttccgtcaagcgaagtatacgatggattaagtgcagtgtatgattatgcacaaaatggcgtcgagttaaaaaagaatattcgtgaatattggtggaaatcaatggttcagatgaatgaaaatattgtcggtttggatgctgcaatattaatgcacccaacaacctggaaagcttcaggccacgttgatgcatttaatgacccattaattgacaataaagattcaaagaaaagatacagagccgatgttttggtagaagattatgctgaaaaacttaatctgaaagctaaaaaagaaattgaaaaagcgagtgctcgttttggagatgcttttaatgagcaggaatttgttactacaaatgcccgtgtaattgaatatctggctaaagaaaaagaaattagagagcgtttaggacgttctttaggaaatggagatttagaagacgtaaaagcactaatcgaagaattagaaattgctgatcctgaaacaggttccagaaactggacggatgtgaaacagttcaatttaatgttcggtacgaagttaggagcttctgcagagtctgcaatggatttgtatttgcgtcccgaaacggctcagggtatttttgtgaatttccttaatgtacaaaaatcgggtcgtatgaaagttccttttggaattgctcaaacgggtaaagcgttcagaaatgaaattgttgcaagacaatttattttccgtatgcgtgaatttgaacaaatggaaatgcagttttttgtacgtccgggtgaagaaatgaaatggtacgaacactggaagactactcgtttaaattggcacctgtctttaggtttaggagagcaaaactatcgttttcacgatcatgaaaagttagcacactatgcaaatgctgctgcagatatcgagttcaacttcccattcggatttaaagaattagaagggattcactctcgtacagattttgatttaaaagcacacgaagaatattccggtagaaaattgcaatattttgaccctgagttgaatgaaaactacgtgccatatgtagtggaaacttctgtaggtttagatcgtatgttcctggctgtttttgccacttctttgcaagaagaagttttagaagacggatcaacaagaaccgtattgaaattgccggccgttttagctccaacaaaagcagctgtattaccattaattaaaagagatggtttacctgagatttctaaaaaaatcatcgaagatttaaaatgggatttcaacgtagcatatgatgaaaaagatgcagtaggtcgtcgatacagaagacaggatgcacttggaacaccattttgtattactgtagatcatcaaacgattgaagacgaaactgtaacgattcgtcacagagatacaatgaaacaagatcgcgttaagatctctgaattaaaagacatcatcgagaacgaggtttcaatgaaaaactggttgatgaaaatgtaatatttacgacatttagatataaaagcccaaattcctttaaggaatttgggcttttttaataccgaatagtgtattttggcgattatttttgcatttcatccttttgtgttaacatttgtttgtaatatattaacaatgaaatagcagaataattgaaatttgtatttttaattgcgaataaatagcgaaacaggagccttttaaaaggatcgatgaaataaaagtttgtcgggggtttaggaaaaatcaactaaagtaagattgaaaaagtattcgtatattattattgacgatgatgtggaaagtattttgaaaaccagaacgattgcagaaggtttttcagaacttacttttgtgggatcggctgcgaattatcaatcgggattgaatttggttttagagcatcgaccacacctcattttgttagaaatagatccgaaagacagatcaagcaatttgtcacttgcttttgtaaatgaacttcatcggttcttgtcgcttattcctaagatcataatcacaacaacaaaaaaagagcttgcttttgaggctattcagcatggtgtttttgattatattttaaaacctgttctacggatcgacttgatgaagactattctgaaactcgaaaaagcatttcctgcagatgattctgataccgttgaggaagacagtacgccattgagtgaattgtttgctgaaccggcaaaaagtactgagcagccccttgtgttatgtgtgaaatcctatggagattatcgctacatcaattccaatgatattagttactttcaggcagataataattcgaccgatatttatttgaattcaggcgaaatgataaccgcttttaaaaccttaaagcattttgaaggcgtattgtcgcatcctttcattaggattcataacagttacatcatcaatcaaaattatattgcaagaatccatagcgggaactcgacttgttatatcaggaattcctccaaaaagattcctttttcgaaaacctataaatcaaatgttgacttaattattgctgatttcgctatagggaattatttagaagtgtaaaaaataagcaactacattgatttgcccctcattgactatcaattgggtacgatctaccataaaccttttttttcctgttattttttttaaatgtgtatttagttttacaccatgattcgcgcatagcgatgatttttaaaactaaaaaaaaacaacaaacatttaataccctcaaattatgaaaaaagcagctttagtattaggaatattttctttagtaatggtttcaacttctttttcttctcctgaagttccgaataatttatctgcttcggcagtattttttgatggatctatttttggtggtggagctactaatcagggacgacaaaaagcagatgttgcttcattagcaagtaatttaaaatcaaatagtaagcaattaagtagttttgcttcagatagtcaatcaacaagaatgactgtaaaagtagactaagagaaaaatacaaacgataagaaaaaggctgtccattacggacagcctttttttgtgtctatacttttagtatttttggtaaaactcttataacgatattgaaaaatacttctctaatattattccttttttgttttgtttttttgggttgtagcgaaaagaataaagaacacaaacctgatattttgcaagaagatagtcttgctatttacctttcgttggcaaaggatatcaatctgcctcttgagtataaaaagaaatacaatacaaaagcattgatgattattacgaatcaggaagatgattcgcttaataaagtaaatctttttaaagttgccaaccggtattacaatatgaatgaatggaaagattatcttcaaaccacaaaattcattttgaaacgatcgatagactccggggattctgttaatgtagctaaagcgtacagttatttaggagattattatgtgtcaaaatcggtatcagacagtgcctttttgaattattttaaggccgagaaagtttattcaaaaataaatgacaggtacaatttagctaagacctatttgaacaaagcgaatcttcagtttaatgaaggagattattttgaaagtgaaattagtgtttttaaagcgcttcggatcttaaaggaggaaaagaatgtcaatgatttgctttatgattgttacaacttattggggttgttgtacaatgaacgggaagagtttaataaggctcttgaatttcataataaagcattggcgattctcacagataaatcaatcccggctgagtttcaattgaaagcaacatcattaaataatataggttttgtcaatttaaagaaacataactacaagattgcaaagtcatattttaaggaagctttggaagagaaaaatttgtacaaacaaaatgcaacattgtacgctatcatcttagataacttggcttattctagatttaagttagaagagcctgaggaattatctacccagttttataaatcattgaaaatcagagacagtcttggtcttaaatcgggggtggttttaagtaaaatgcatttgtcggaatattttgcttccaaaaaagatacttttaaagctattcaatattcaaaacaggctttgattttgtcccgtagctcaaatcaaatcaataatgttttggaagttctgaggcaaattgccgttgtagatcctcaaaatgcgtccgtttattccgcagagtttattcagttaaacgacaagatgcttaaattggagagaaacatgggggaaaaattttccagaatacaatatgaaaccagcgaaataaagaaccaaaattcaagtttacaggagaaaaataaaactttaatttatgttttcagtatttgcacattaattggtctgtttttttatgtttataaaacacagcaggccagacacagggaattactctttaaacaacagcagcaggttgcgaacgaagacatctataatttgatgattttgcagcaaaatgacattgaacaaacccgaattaaagaaaagaaaaaagtagcgcaggatttacacgatggtgtgttgggaagaatgtttggtgtgagaatcagtcttgatagtttagataaagtagatgagggtgaggcggctcctaagagaaaaaaataccttgaggaactgaaaaaaattgaagaagatatacgtgagatttcgcatgatttaaacagagaaaaatcggaattaattaataattttatcgcgattttaaacaaattgtttgaggatcaaagaaacacctatgaggtaaaattaattagttcttttgattccaatattaaatgggaactcgtgagtaataacgtaaaaattaatttatacagaattattcaggaagcgcttcaaaattgcaataagtatgcgaaggcgagtacaatagtggttgaattcaaaagtgaagtcgaccatttggttttgtcaattgctgatgacggaatcgggtttaataccaaaacaacaagaaaaggtataggattgcataatattcaatacagagcgacagaatgtaaaggctctgttttcttaaaatcggccaaaggagaaggaactcttatgatagttaaaattccaatagatcaaaaaataaatctacagcatacatgacaattgaccccaatccacaggctcctcaattaattaggaaaaacattttaattgttgacgatcacccttttattattgaaggatataagaatgcgataacacgttataatcctgataagtatcagttttttattttgcaggcccatgattgtaaatcagggtatgatttaatcgaagatgctcagactcctgaatttgatgttgcttttttagatatcagcatgcctccatacgaagaaaagaatattttttcgggtgaagatctggcgaaattacttctgaagaaaatgccaaaatgcaaaataattctgttaacaatgtataccgaattattaaaaattaaaacaatcatcagaaccattagccccaatggtttaattatcaaaaatgatctcacttttgatgaattgctttttgcatttgataaagtaatgaaaagtgataaatattacagccagtccgttcagaagatactcaatcaatcggctcataattctattgaaattgatgagtttgacaagcaaattttatttcacttgtcaaaaggaacttctgtagcagacatgccgcaatacattccaatttctgttaatgaaatcgaaaagcgcaaagcgggtcttaaagaactgcttaaagtgagaagcggttttgatgaagacctggtcaaagaagcgaaatgtaaagggcttttttagaaggggaaattccaaaaaaaaatccaaattccagggatattaccggaatttggattttttttatttcagtctcagttctcagttcttagttctcagtctcagtctcagttctcagtttcatttttactaaagactgcgaccgggaactgcgcctgaaaactgcgactaaaaaactactccgtcagagcatcccagccacgggctttcagtgcaatttttgtattggcacgggttaccagatgaactccttcgctttcatcagccatgtgaccaataatcgagaagttagggttgccttttattttatcaaaatcattaatatcgatggtgaataataattcataatcttcaccgccatttatagcaaccgttgtactgtcgatattgaattcttcacaggtcgaaatgaattgagggtctagcggaagtttatcttcatacaaattacaacccacttttgattgtttgcagagatgcataatttcagaagacaatccgtctgaaatatcaatcatcgctgtaggtttaatttcaagtgcatgcaataaagtacgaacatcttttcgggcctctggttttaactggcgctcgatcaaataactgtacatatccagatccggctggctgttaggattcacctgaaaaacctgtttttcacgctccaatacctgcaatcccatataagctgctcctatgtctccggtaacaacaagtaagtcggtttgtttggcaccatttcggtaaacaatttcttcttcgttagcttcaccaattgcagtgatgctaataattagtcctttttgcgatgaggtagtatcaccaccaataacatctactttgtactcttttgcagcatgtgtaatgccttcaaataattcttctaaggcttctagtgggaaacgattagaaaccgccacagaaaccgttatttgcgttggttttgcattcatcgcacaaatgtcggacaggttaacaacaaccgatttgtaacctaaatgttttaaaggcatatacgccaggtcaaaatgtacgccctcaattaataaatcggtggagaccactacttttttgtccttaaaatcaaggacagcggcatcatcgcctatactttttagggtagattcctgagtgacatcaaaatttttggttaaatggtcaattaggccaaactcgcctaattgtgctatactggtacgttgcggatttttatcttcgatcattttcttttaagttccaaagtttgtaaggggcaaaggtacaaaggttttgtttaattttttggattgtcgtctgcattactttttcattatgaagagctttaccggaaaagtcgattccgtttattttcgataggattcttcccgccttcaaattagataaattcaaaagggaagaagctgcttcatctgtatttttactgagcaaatttattgttttgttttttagagtttgtttatcagtgatttatggcgttgaatctgagcaaaatgtaataaatttgtgcgtcctgctgttagaaaagaaaatatttttaaaattttattttcctgctgacatactgttgtcaccgaccctcaatacttttgaagtatcaaataattaaaactttaaaattatgaaaacattagcagctcaagtaattactccagaagatttattgatacactggcaaggacaccgtaagcttacacgtaaccttattgaaaaatttccggagaaagattttttcgaattttcaattggaggaatgcgaactttcgccaagttgaccgatgagcttttagctatcgcagttccgggtattaaaggaattgtaaacagagaagtgaagccattttcagaagaagcaacagagaaactgattttcaaagcgcaatatcttgaaaaatgggatgaagcaacagctgaaatcaatgaactctggcaaaaattatcgatcgaagactttagtgaaaattttaacctttttggtcagtatgaatttccaatatatcagaacatactgtattttattgacaatgaagtacaccaccgcggacaaggatatgtgtatttaagagctttaaatatagaacctccatttttctgggaaagataatcgtaaccggaagtatttgataaattttattctaatataaatcgaacagtatgagttttaaaaaaatcatgaccaattatgccgcttataatttatgggtaaatcaacaatttgtgaattggctttcggcaaaaaccgatgaattgctgcataaagaagttctttcaagctatcctagcattattaaaacgctacatcatatttgggaaaccgaagaatactggttttcaataatagccgaaattccacaaccggaaagaagggaagctgttgatttgaacaaggatgaaatatttgaaggattattgagtacctccacaaaattagctgcatttatcacatcattatcagacgaacagttattgaaaacaatcaaaattgaaaatccatggtttcagtgcgaacagcctgtaagcgactacttgctgcaggtggtgaatcacggaacgtatcaccgaggacaaattgtaaccattggaagaaatgttggtattactgatgcttctaacactgattataatttttacaatgtggtaaaagagaaacactagatttgaaaaactcctaaggatgatattttatctttaggagtttttttttatagcagtcttttacggttgatttccagtaattccagtgttttggccttgagtatttcaggttccagaatcgtagcgtaatctccatacattagaaaccatcgcggaaatgagttttcaatatcgcgtgacataaaagtcatttctatttttccgtctacttctttttctgaaatgaatccgtggtactttttttcggtacccaggtaacgggcgatttttttgtcaactaaaattcggacttttgttgttggacaagtttctgtttttttgatataagtttctaaagcatcgtgttcgatcgtaaaatcagaatctgtttttcgaataccctgaattctgtctgttctaaactgacgatagtcttgtcgtaaatgacaatatcctaaaaaataccagttgttgttatcgtgaaaaacacccacaggttctatgtttctttgcgtagccgtatcggtttcgtaggttttgtacgaaagtaaaagctgttttttctctgcaataccttcaaaaagaagtgctaaagtatttggcgaattatcattaaacatcggttcggaagtgttcattataacccgcgattcgatattggatagccagtctttatcggtacttcttaaaacagatttcagtttgtacatggccgaagcataatgagctccaagcgaaggatcggtaaatttctgcataagtttttcggcagcaataaagctgcttacttcttcgcgtgtaaacataacgggaggtaatctgtaaccgtccattaacgcataacccactccggcttcactgtaaatagggactcctgaagcttccagcgttcgaatgtctctataaatcgttcgtaaactacaatcaaaacgatcggccaattcctgtgcttttacaatttttttggattgtaattggatgaggatggcgataattcggtcaaatcgttttggagtttcgtccattttttctaggttcaaaggttcagaggttcaaagttacaaaggtttgatgtttaaagaaataaaaagctgttccaaattgagacagattgcttttgttttgcgtctgcgatataatgtgctcataaggttattgttgaaatataaaataacagtttgctggtttcaaaaaggtatttcgctccattggagctttttgatgctggggaattacattttcgatgcgtattttactccgctggagcagtttgagatagaaaaagtggtagttcttttcgagaaaaattttaattgatgtaaaacaaaggggctgaatcatttatgagtcagcccctttgtttattcagataattggcattgtttactccgttggagcaaaatatttatagataataaaaagcagtagggggaaaagctccagcggagcggtatattttgccttacagtacagggttttctaatttttgtaaatatcctggtctgcaaaaattcacgataatgtgtttgaacaaagtgtatgaattatttcaattacaataaacaatatgtattgctcgcttctctaaaaacacaacaatattaaaaagtaaagtaccgataactttagtccttaccttcatgttacttattttttccagatctcaggatttcttgaagtatgaaaaacagcaagaacgtttactgttttaaggtcttcgttaattgaataatgaattaaaaacggaaatttttcaatcttccaacatcttatttcatgatatttctttgaaaacaaatatggatttttctttaaagaattaatttgttttttggtttgatttttaaaacgtgatcccaaaccttttgattgcatttcataccattcagaagtattttgaatgtcattgaaagcatcaatatctatttttaaagagtaattcaaaaattatagatttttagcaacatcatcccagtctaaaagtctttctggatttgctttggcttttgttattctgtctaaaactattttctgatgctcaaccggaatttccatactatcattccagatagcatcattgattttcagcctgtcttttggggatagttgttttactgcctcaatcaattggttaacacttagattgatgtttaattttatagtttccataagaacaaagttaatgaaaaaatgattttaaagtgaatgaatttcttgacaacaagattatttttatttgtctgctgctccggctggaggtaattgagtttattctgaagctttttttgaaaaatagaatcattaccataaattccttttcaaattgaaacaaaaaaacctgacaattttcatcatcaggttttctctatattctttgttctttactctattttctcaaaaaaaacttagtcgttcaatttcaaaacagccataaatgcctcttgtggaatctcaacgtttcctacctgacgcatacgtttcttaccttttttctgtttttcaagaagtttacgtttacgggagatatctccaccataacattttgcggtaacgtctttacgaagtgctttaatcgtttcacgagcgataattttagcaccaatcgcagcctgaatcggaatgtcgaattgttgtcttggtatcaattcacgtaatttctcggtcatttttttaccgatgttgtaagcgttgtcttcgtgaatcaaagcagaaagtgcatcaaccgtttgagcgttcaaaagaacatccagttttaccagttttgaagttctcattccaataggagagtagtcaaaagaagcataacctttagaaaccgtttttaaacgatcgtaaaaatcgaatacaatttcggccaatggcatgtcaaaattcagttccacacgttctgttgtcaaatacgtttgattggtaatctgaccacgtttttcgatacacaagctcattacgtttccaacgaaatcggcttttgtaatgatagttgcttttataaaaggttcttcaacacggtctaaacgagaaggttcaggcaagtctgaaggattgttcaccacaaatgcagtttcgggatcttttttggtatacgccaaatacgaaacgttaggtacggtagtaataaccgtcatgtcgaactcacgctctaaacgttcctggataatttccatatgaagcattcctaagaatccgcaacggaaaccaaatcctaaagcggcagagctttccggagtaaagactaatgaagcatcgtttaattgcaatttctccatagaagaacgcagatcttcataatcttcggtatcaacaggataaattccggcgaaaaccattggttttacatcctcgaaacctgtaatcatattggttgttggtgttttggcatctgtaagagtatctcccacttttacctctttggcttctttaattcctgaaattaaataaccaacatcaccggtagaaattacattttttggaacctgatttagttttaaagtccccacttcatcggcaaaatattcattgccagtagccatgaatttaattttttgcccttttctgatttcaccattcatcactctgaagataacctcgattccacgaaacgggttgtaatgtgaatcaaagatcaatgcttgcaatggttcgtcaacatttccttttggggccggaattttttcaataatagcggctaagatattctccacaccaaaaccagtttttcccgaagcatgaataatatcttctaatttacatcctaataaatcgataatatcatcgcttacttcttcaggattggcactaggtaaatctactttattcaaaaccggaataatctcaagatcattctctaaagccagatataagttggaaatagtttgtgcctggatactttgtgctgcatcaacgattaaaagagcaccttcacaggccgcaatagatcgcgaaacttcgtatgaaaagtcgacgtgaccgggagtgtcaattaaatttaaaatatattcttctcccttgtaagtgtattccatctgaatggcgtgactcttaatggtaattccacgttcacgttccagatccatgttgtcaagcaattgtgctttttcttcacgagctgtaacggtttgtgtagcgcccaataagcggtctgccagtgtacttttaccgtggtcaatgtgtgcaataatgcaaaagttacgtatcttcttcattttaatatgtcaattctctaaacgagtttaagtaatttccgggtctaaacttgcactgtagcaattgccttagagcatgttaataaaccgcaaagatagcgcaaagttttggattctggaatgttgatctccgatagttgaatacggaattttaaaatagtttttaaaagactagataatactgtgatttttctaaaaatagagcaaatccgacagattttaaaacctgtcgggtttggtgtagcaaaacaattaactaaattattctaactttaaattataacccagttgaaagtacaacggaaccataggttttgttttaaaatcctgggtaattacttttcccagtcgtaaagtaaggtcacttcggcgaaaggaatatccggcttgtatgccgtagttgaaattgcctccggtcgcaggttcataccaaccgtcttttacattgggatagacgtctttgtaaatagccgaatttttaaaatgggtagcaatggctttatcaaaaccaaattctccggcgacaaaccatctcggtttataatacccaacaatcgcagttgcatcggcgccaaagttttgtaaggtgactaacggattttcgtatcggcgataaattccgtgaagggcggcattaaaacggaaatgattcagctggtaaaggttcagttgtccgccaattttagttttaaaatcatccaatactgtttcgcctgatggcaaggaaaaagatgcttcgactacaattggcagtttggttttgagatggtaaccgtaagcaagttcgtaaacaaaactatgttcccagccggcatttatgtttagaatgtgtttttgattcttgttaagactttcccagtttaaggtttgagaataggtttttcctacgaaaagagagaagataaaggtgctgattaataatactgttttcatcatgggattattttagatcatttaaatagttcagtacaaaaggatgcacattttcccatttgaagtagatcatctcgtgcccagtaccttttacttcagctagggcagtattaggaaaaaaggcggcttctttttgggcgaaggataaaccataggactgatttaattcgccatacaaaaacaggactttcgttttgtactgacttaggtttgtagtaaaatcaaagccttcattttcagcaatgtcagttaaactttctaaaacggttgttccgattcgccaaaatggggatggacctgaaataccttccttgttgcctttcgcataagagaaacctgtagaaactcccagtttatagtcaagaatttcatgttggttttcttttcccgttaaaaattgatcgatatacaataaattgctggtggcctcggagaataattttattttacggctcatttctccgtaatcgtctaatagttttttgtttagtccgcccggttccgccagaataacaccattgatggccgttgggtatttgttgacataggcggcggcaagcatggcgccccaggaatgtccgaaaagaaatgtcttttgagtgggtgttttacggtaatattttatgacttcagagagatcgtcgatcatcaattgaatggagtaggtgtttttgtcgtgtcttttggataatccggaacctctttggtcgtaaaaaatcacatagtaaccttcgtcggcgagttgttttacattcagaccatttctgtaatcggatccgggaccaccatgcaggaaaactaacataggatggttagggtttccgaaagtttcagcatgaagttgtgttccgtttataaaaatcgaaggtaaggttggatcctggtcgactgttttcggaactaaatttcctggttcatcaacatcattttcctgttcgcatccccagaaaaggaaaagagaaaggacaattgtgacagagtaaaaagctttgtttctcattgcataaattggtttaaatttctgcaaagatgtactgtggtactatgctggtcgccccaacttgtaaggtggttccagtttataacttaaaaacctgtcgggtttaaaattgaagttatttcagggattaaggaatgagctcattttttaacacatagggacatagatttttatcttaaaataaaggagatcaaaaaacaagttttcgcacatagctatgtttgtttgaaacaaatgaaatgccttttttaagtttacaaagactatgtttctatgtgtttaggagaattgatttttgaattataaattcaaatccgacaggtttttaaaaacctgtcggatttaaaatgaaagtttttttaaatattcagaaggagaaactccagttgcttttttgaagtttcggttgaaagctgtttttgaattaaatccgcattcaaatgctatggagagaaaagtaaatttttgattttcgggtaaaagaatggttcttttaaattcttcaacacgctggaaattgatgtaatcgtaaaagtttttctgttctgccgagttgataacctgtgaaagtatgttgggatgaacacttatcttttgggaaagctcggttaaagttaaatcggcatttttgtagattttttcatcatccatgagttgtgtcagtctttgatggatagccgtaagttctgaagaagtaagtcctgatttctcgtatttaattttttcagatgtatttttggtgtcaacgctttcagatgttaaagtcttagaatgattattttcggaaagcggctgattggtgaaaattccaacctgcttaacgccgaaataaccaataaaaatgagatagaaaaccacaactgaaaaaatatattgatcatcaaagaagagaattgccagccagataatgcaagatccaagaattaaatagcgcagccaggtcaggttgattctttcggtatgcgaaaattgattgttgatgttcttttggtgttttacaagtttttgcagcgaaagtaaaggataaataattcccgaaaatacgattgcagcatacaaaatagatattagggtttcgtagcctttgcctttgtttttaaaaacggctgctttttcttcgaaagacaaattataaaacggaatcagtatcagaatggcagctagaaaaggaataaaatgtaaaagattaaactttttatagcgattttggttcgttaaagccgaagtgtataaaaataaaaaaggtccctgaactaaaggcattgggagttctaaacccagtaaaaaagggaagtccctatagtcatttttgtaatgaagatagaacaggaataaatgaaagccggtaaaaaacagccaaagtgccagaatcttgtcggcctcggttttgttccttttgcttgccagtacaacaaccaaaaaaaaggtgattataatgccggttaaatacaacatacaggtctggggtataaattaaatcggttgttaaaatatcgaccaagataatttattttgctcaattgtctgcagttgaggtgttttgcaaagattaattttttataacctgtttggcaaagtagtgagactattattcctctttagacgtttctgtatggtggcctttaaattccccataccatttttcgattgatggataaacaaaagcggctacttttttaaccggattgtaaaaaatagaatgatccaaggtttcttttttagcaaaagtgttattgaaattgatcttctcaaaaagagcgataaaaatacttaagattagtatggtttttaaaattctgaaaaagccaccgcctaatttattgggtaatcccaaaaaggcaaaatcggcaattccggtaaggattttagctaggaagtaaataccaattaccactaaaataaaagtgagaataaaagcagtgatttgtatcgtgttcggattccaggaaacatgcttcatgatcaattctttcataaaagaagagaatttaatcgcaatatagattcccaacaataaagaaacgaaagaagcaacttctacaaaaagcccgtttttaattcctttatataaactaaaagctaaaagagcggccacaattatatcaaaaaaactcatatttgggtgtgtttaaaaaagcgcaaagatatacttttttaggttcggaggttcagagtggcaaaggttcagctgtttttttggagttcttcttttctaagtgtttaatttttttaggtgcaatgtgttgaactatgtatctttgtaaatcaaaatttagtgttaagattgtaattctgtccccttcagaattgaattttgcaacaatctaagatctaaactcaagaatctaaaatcataaaatgtccagagatacacaactaaaagagcgatgggaaaagctcgtcgatatattgtctaatcaattttcacaaggagaagatttagatttagacgccataatttatttaatcggagttcaggaacttggaaaagtacaccgtgaattcaaaaaagatgaaaaattaaacctaatgcacatcgccatttgtcgattattggaaccttatgggttttatgaatttgacttttttgatgccgagggatggccacattataaagtaaaagaagaattaccgccactgaaagcaggcgaacaatcggttttgatgaaagaagccattgtgaattattttttagaaagagaactgatagagtagtttttagtctcagcctcagttttaagtccaattgagactgaaaactgagactgagactgtatactttaaagtaaaattatgtaaatttgcaccttcaaagcaagactgatgatagacaagataaaagaacatatagaggaagcaaaagcctttaatgataaaaataaagaatctttagagcaattccgtatcaagtatttaggtagtagaggtttagttagagaacttttcaatgagtttaaaaatattccaaacgaccagaaaaaagattttggagtagtaatgaatactttaaaaactgctgcggaagaaaaggtaaaagcgattcaggaagagctggaaagcaagcaggaagtaaaaggaatgtttggtgatttaactcgtgcggccgaaccagtaattattggttcacgtcacccgatttcaattgttaaaaatcagattattgatatttttgcaaacattggtttcaacgtttctgaaggtccggaaatcgaagacgactggcataatttcaccgctttgaacttaccggaataccatccggcacgtgatatgcaggatacttttttcattcagactaatcctgatgtgttgttgcgtacgcatacatcatctgttcaggtgcgttatatggaaaatcataaaccgccaattcgtactatttctccgggacgtgtgtttcgtaacgaagcgatttcgtctcgttcacactgtattttccatcaggtagaaggtttgtatattgacaaagaggtatcgtttgccgatttaaaacagacgttgctttatttcactaaagaaatgttcggaaaatcgaaaattcgtttgcgtccgtcttactttccatttactgaaccaagtgccgaaattgatatttattggggtctaaaaaccgaaactgattatcgtattaccaaaggtactggctggctggaaattggaggttgcggaatggtagatccaaatgttttgaaaaattgtgacatcaatcctgatgaatacaacggttttgctttcggaatgggagtagagcgtattgctatgttactgtatcaaattggtgatattcgtatgttttacgaaaatgatgttcgtttcttagaacagttcaaggccaatatttaaaaataaagttattagtgaatagtgattagtgagaagccttctttctaatcactatttacattttatgaattactaagattatgaaaaaagatataacaattcccgaagtagaaaacgtatttcttgcagcagtacaggaatggagcgacgactttatggaaaaagtatggtacgcttacctggtaaatgacagtgattttaacctcgacagcgtgatggtagtttcaaaagcatttggaacgattgatggcgagatgaaaaaaacgtctgttttacgtcatgcctttgtagaagttcctgcagtttcggttgtcaaaatcgaaatggttgaaaagagtttactggtactgaacaacgagtttatggtaacgttcttcattggaaatacattgtacgacaagaaatttacttttaaagcaaacctgatcaacgaaaacgatacggaggaagtgcctattttatttgttgaaggagttatggtgaagtaagtagagcggagtgcagatttgtagaagcaagaagcaagaagctagagcaaagaggcaagaagatagattgtagagaatagaatatagagtttagatttctttatattaaaataaaaaagagtcaagatgaattttaattctgtcctgactctttttttatctgtcaaaaacaagctcacaatcttataatcttgcttctttgctcttgtctctatactctttgctcttgcctctatattctatactctcacttctctaaaaagaaactaatccaaagactccgttaattttttgaaaaccgattttgcatcttttccttcgtataaaacagcgtagacagcatcgataattggcgtttttgcaccatagccctgatttagtttataagcgcttttagtggcgtaataaccttcggccaccatactcatctccatcatcgcactttttaccgtatagcctttaccaatcatgtttccgaacattctgtttcttgagaacacagagtaacctgtaaccaataaatcgcctaaataagcggagtcattgatgttacgtttcattttatgaactttgcggataaatttcttcatctcgcgaattccgttactcatcataaccgattgaaagttatccccataacctaatccgtgagcaattccggctgcaatagcataaatgtttttaagcattgccgcatattcagtaccaataatatcgtctgagattttggctttgatataatttccggacaaatgttttgctacgattgaagctttttccggatccccacaggcaattgttaagtaagaaagtctttctaatgctacttcttcagcatgacaaggaccagtaattacaccgatattgtagtagggaatgtcgtattgaatgtgaaaatgttccccaacaatcaaacttgtttcaggaacgattcctttaatagcagaaaagataattttatcagacaatgaaaccgttaagtttttcaattcaccatctaaaaaagcagaaggaattgcaaaaattacataatctgcataggcaactgcttcattaatattattggtcagtttaagttttgccgtatcaaattcaaccgaacttaagtaattcggattgtgtttgtatttctgaatgtgttcgatagcagcatcattacgcatgtaccaggcaatttctgaaagatttacacataacatctttgcaattgccgttgcccagcttcctcctccaattactgcaaattttaaattttcactcattattttaataatttaaagcaaaagtacttaataatgtagtaataatacaaaatctcatttaagaaatttggaaaggctctttaaatacaatggtttccggaggatttaaattggaatagaaaatattttaacgattacacaataaaaaggtaatcagtacgttgtaactatttataaattagaatttaatgagtttagcaagaattgagttagttaattttgttttagtattgtaagaaggcgttcccataaaatgagaacgcctttttttgtaaaattccaaatgagcttaaaattggaatttggatttttttatttagaatttatgccttagtagctcatttcaacaatcgattttactttgtctaaagtaattagttgtttttcgcccaaacctttccagcctctttcattaaatcggtttacaataaaatcagccgttttgctataatcgtctgtgtattgcgaaagtttagtatccattcccatagtatggaaaaatgctaccgtttgattgatggcttcttttgctacttcatcgtcagaacccgctaagttgaaaattcttctgccgtattgggcaagtttttcttttttggtctcaaacatgatttggtataaactaggtccgatgattgccaaagttctggcatgatcaattccgtataaggctgttaattcgtgtccgatcatgtgagttgcccagtctgaaggaactcctttttgaatcaatccgtttaaagccatggtacagctccacataaaattagaagccaaagcataatcggtaggattttcaaccacttttggaccaacttcaattaacgtctgtaaaattccttcagcaatgcggtcttgtaaaaaaccttcgtgcggataagtcaggtattgctccattacgtgcgtataagcatccacaacgccattttgtaattgtctttttggtaacgaagcaattacagtcggatcgcaaattgaaaatttagggaaaagagcacttccgccaaaagcaagtttttcctgagttgcctcaatagtgacaaccgctcccgaattcatttcacttcctgttgcaggtaaagtcagaacagttccgaaaggcatagcattttctttaataagtaatcgtttttgcagaatatcaatcggatctccgtcgaaatttacagctgctgaaataaattttacaccatcgattacggaaccaccgccaacagctaagataaaatcaatttttttagctttgatcacagcaaccgctttcatcagcgtttcaaaatgcggattgggttcgattccgccaaattctacaatatcgaaaccttttaagttttgaatcacctgttcgtgaattccgtttttaaaaatacttccaccaccataggccaataagattttggcatctttaggaaccagagtagaaagtttttcaatttgtccttttccgaaaattaaattcgtcggattgtataattcaaagtttagcattttttttagagtttctaagatgctgaggggctagggttctaagttttttctttagattcttaaaatctcaatgtctcagcatctttcattatttttttattgttaagttcattagtttaataacttagaatcttagtgtcttagtacctcagaatctttattaattcaattgctgtaataattttccggctactaatttagatgaagcggggttttgcccggtaattttttaagtttctaagatgctgaggttctatggttctaagttttctttagattcttaaaatctcaatgtctcagcatctttcattatagtaattgttttattttaatgtttctaagtcctgttgcttagaacctcagaaccttagtatctcagtgtctttattaattcaattgctgtaataattttccggctactaatttagatgaagcggggttttgccccgtgattaaaaggccgtcttctacagcataaggttgccagttggctgctttcgaaaagatagcaccatttttggtcaaagcatcttccaataagaacggaactactttggttaagcccaccgcttcttcttcggcatttgtgaaaccggttacttttttgccttttactaaaaattcgcctttaacttttacgttttttaagactgccggagcatgacaaacaaaagcaacgggttttttatgagtatagaaagattcaattaaagcaatggaacttttatcttctaccaaatcccaaagcggaccatgacctcccgggtaaaaaacagcatcataacctttctggttgatcgtagaaagtttatgggtgtgttttaacttctcctgtaaagttttatcggcgtcaaaacgtttggtgtcttcagtggccgatgccggatcggcacttttaggatcaattggaggctgacctcctagtggagaagcaattgtaatctcgacgccctgatctaacaattcgtaataaggtgcagcaaattcttctgaccaaaatccggttttctctcctgtatttcccagtttatcgttactggtcacaacaaatagtacttttttggtgctttttttcgttgctttttgtgctatagctgaagtactaaaagcactaaaggctataatcgtaagtaaggttatctttttcataagtttaaattttgatcaaatttacgactaaagtgatatcagtaaaaataaaataaactatgtttgttataaatatatttatatcatggtgaatttggagtggtacagaacctttaaggctgtatataaaaacgggaatttttctatcgctgcaaaagagttatttatgagtcagcctgcggtgagccagcaaatctctatgctggaagcacatgttggaaataaattgttcaatcgaaagtcaaaaggcgtagaaccaacggaatacgctaagttactgaataatttaattatagatgcgctggatcggcttgaaaatgtagaaagcagctttcgggcaaaagcggaagatgccaatcggctaatctctgttgggatctccaaaaatctttttaattgtattggaaacctgttgattgctaagttcgatttgatcgattttacttttgcagaaaacgatgtgctttttgagttagtggatgctaaaaagcttgacttcgcaattaccacaaaaagatttgacacctttgatacggtctacgaaattgtggggaaaattaagctcatcatggtggcaccagtacgtttggacggaacagagttccgtcagaaattaaaatcagataattatacggaagtagagcagtggctcaatgaacaaaaatggtacagtcacgatgccagaattccacatataaagttattttggctacacgcttttaataaaaaaaggccctctatggttccgaactatattattccgtctgaatctgaaatgttaaggatgttatccgataatgaaggagtagcgataacctggaactgcaatgcacgaaaatatattaaagaaaataaattgcagttattatggaatagtttttacgtaccggaagagtatgtgtacctgctaaccgctaaaaacaataatctgaattcgttttttgaaattatttccaaagagttaaaattgttttttggtaacagattatgatgaaaatcattgttttctgtatttttaaagaataattttgggagataaattcttaatatttttaaaaatgaaaaagattgcatcaattttaatgcttgccctgatattttatacggctaattcttgtagcaaacatgacgacgaggttatcttggattgttttgcagaagcaatttatgtaaaattgcacaattctacagatgctactaatccaaaattaatgaactattctgttggatatagcggaaccggaactttagttagtgtaaattggacatttggagacgggactaccggaacaggtaaagatattacacatctttatccggcagcaggaacctatgaagttaaagcggaagttacagttgcaaaagatggtgcaaattgtacttctattccaaagagaaacgtaacaataaactaggcaggccgaaggaaaaggatattcatgagagtcaattttataatttattgctgatgtgatagattataaaattgactctcattcgttatatttgtgagataggagtttttaaatatggaaaattttcaaaatattcgaattgcggttgatgccattgtgtttggatataagaacaacagtttgtatgtgcttttaattgagcaaaaatttggctctgccgataagtattgggctttaccgggtggattagtaaaacaggacgaatctttaagtgaagctgtgattagggagttgcatgaagagaccagcgttcagcttacttttatggagcagctgtatacttttggagatgacattcaccgggactccagaaatcgcgtaatttctgttgcctattatgctttagtagatgcctcaggtctggaaattaaagccgataccgatgccgaacgcgtgcaatggtttaaaattgatgagatccctgatctggcattcgatcataatataatcgtaaaaactgccataacaagattaaaagcaaaactgacttatgaacccgttggttttgatttacttccgcaggaatttctgttttctgacctcgagaatctttactgtaccattttggagaaagaaatagaccgtcgaaatttcagaaagaagatactcagctacggctttttagatcaaaccgatcatttttcgccagttaaaagtgggcgtcctgcaaaacttttcaagtttaacgatttgaaatataaagagttaattgagaaagggtttcactttgaaataaagtttgcgtaaattttacacaaaataaattgtttaataaatatattgctttatatttgcgtataattaacgcaaactaaaatactatgatacttaatttagacccaaaattcactccaattcttaataaagaagaaataaaattccaaagctttacattttcaggaggagaaccacatattaaaatcaatcctgattttgataatacccaaaaagtaaccatcacacaccgattaaattcattcaacgatttaggtttattgtgcatcacagtagatgcattgcgcagaatggaggttaaaataattgatctttttattccctattttcctgcagccagacaggatcgtgtcatgattaaaggggaatctttatctgtaaaagtatatgctgatatcattaatgcacttcagttgaataaagtgtttgtttttgatgcgcattctgaagtgactccggccttagtaaacaattgcgaagtgattccgaatcatacttttattgcagcggttttgaaagtcattggcgaaaacgtaaaattaatttctccggacggcggagcattaaagaaaatttacaaagtttctgaatttcttggaggtattgaagtagtagaatgcagcaaaagccgtgatgtaaaaactggaagactatctggttttaaagtttatgaagacgatctaaacggaatggactgtttaattgtagatgatatttgcgacggaggaggaactttcgtagggctggctgaagaattaaaaaagaaaaatgctggaaaattgtatttggccgtaagccacggaatttttaataaaggttttgaagttttggattgtttcgatgccatttttaccaccaattcagtaaaagacttcgaaggtgaaagcgttcaggtgattggattggatcaattaatttaagaagtttcaagttacaggtttcaagctgtataaggaacctgaaacagaataacagagaactcgtttctttgtttcaataacaaaaaacatgaaatacaatatagataccatagctccggaaagtaaatttttatttttctggggacaccagccaacaaaagatggaagcatttcgaaaacctgtttcagtcagtggtggttaagtgcctttaccgttgataaagtgacttacaaaactgccgaacattggatgatggcaaaaaaagccgaattgtttaatgacaatgaagttttagcaaaaattattaaagccaattctcctgctgaagccaaaaagttgggacgtcaagttaaaaattatgacgatacactttggttagccaatcgatttgagattgttacacaaggaaactaccataagttcagtcaaaaccccgatttgaaagcatttttgctaaacacagatgaaagagtaatagtcgaagcgagtcccgttgatcctatctggggaattggaatggcaggtgaccataaagatgttctgaatcctgaaaagtggaaagggctgaatttattaggttttgctttgatggaagttagggatgaattgagataactataggttatgaaaatagaaatcattagaaccgatataaccgaaatacacgttgatgctattgtcaatgcagcaaatacttctttattaggcggtggtggggttgatggggctattcatagaaaaggaggaaaagccattttagaggagtgtacccaaattcgaaataaacagggtggatgtaaagttggggatgccgtgctaacgacagctggtaatttgccttcaaaatatgtgattcatactgttggacctgtttggaacggaggtaaaagttttgaagtcgaattgttgcaaaactgttatttaagtgttttagaattggcggtcacaaataatataaaaacaatcgcttttcctaatataagtactggtatttataaattcccaaaagatttggcggcggaaattgcgattaatatgatcgataattttgaattaaaaaatcatttcgaaaaaattgtttttgtttgttttgatgaagagaatttcaaaatttataatgatataatagaaaatgacttcaattataaaattaaatccggcttgtttggagtagcggttggtgatgcattaggtgttccagttgagttttattctagatctgatttaaaagaaaatcctgtttctgaaatgataggttttggaacacatcaccagccagcaggaacatggagtgatgacagctcacttgctttttgtttagcagaaagtttgtgtaatggttatgatttatctgatattgcaagaaattttgtaaaatggtataacacagaattatggacgccacacggaaaggtttttgatattggaatagcaaccagaaatgcaattcataatattgggaaaggacatgaaccagaattatgcggcggttttgaagaaaaagataacggaaatggttctttgatgagaatcttacctttagttttttatcttaaaaatgaaaaagatatcgaagtcatttataaaaaagtaaaagaagtatcgtctattacccatgcccattttagatcaggatttgcctgttttatttatgttgtttactgtttagaacttttaaatgccaatgataagacagaagcttatagaaggatgcaggatgttgtcgctggctttttgcgagataaaaaatttagtcctgttgaacttcaattgtttgatagaattttaaagagtaatatagccgaatatcccgaaaatgaaattcattcgtcaggttacgttcttcatagtttagaagccagtttatggtgttttttaaattggaattcttatgaaggaaccgttttaaaggcagtaaacttaggaggtgatactgatacaactgcagctattacaggaggtttggcaggtatttattatggaattgagaacattcctcagaagtggattttgggattagcaagaaaaaacgatattgatgatttgtgtgaacgattgtttttaaagttaaaataataaaagttatgaatgaaaaaacagcaaaaagcgtcagcaaatttcttagtctggtgctcagacattcacctgaaaccatcggcttaaacttagacgaaaacggatgggcagatgttgaagaattgattataaaatgtaataaaaatggaagccaaaatcagatgacggctgaacttttggactatgtggtagaaaataatgataaaaaacgttttgcttttaatgaagacaaaacaaagatcagagccagtcagggacattcaatttcagttgagctcaacttgaaggaggccgaaccttcagagtttttataccacggaaccgttgggaaatttatggaaagcataaaacttgatggcttacaaaaaatgagccgtcagcacgtacacctttccaaagacaaagaaacggcaataaaggtgggaagcaggcgaggagccccccaaattctaaccgtaagaagtggtgccatgtacagagacggatttcaattttatctgtccgaaaataatgtttggctgaccgctgaggttccggcaaagtacatagagtttaaattataaggagtagtaggcatcattttaaaattataaaacacaacaaattatgatactagaagcagcaataggtgatgcatatggtgcaggttttgaatttcgggatttagattttattgctcaaaacaaccatttaacccagtatcacaaacacggactttatactgaaatttacaaacgctatacagacgatacgcaaatggcaattgccatctcagaattgttattagaagaggataattggaacgaaatcaaagtagccgataagtttgttgaggtatttcaccgagataaaagaagaggatactctgatagagtctacaatgccttggacgcaagtagaaatggatctgatttcattaaaataatcaacaatggcagtaacggaaacggttctgctatgcgggcctatagtattggttatttaaaagatatagagcagttgatgagtttctgcgaaattcaggcaagaacttctcatcatactcctgaagggattagttgtgcgaagcgtattgccttggccgttcactatttcaaatacaatttgggtgatggatcgactttagtgtcatttttgaacgaaacgctaaaggagaatgaaacctataaaattacttcgccaatcgatatgcacggttatccgactacacaggcggttattaaaatcgtttccgaagcgacttccatgaaagattgcttaaaaacaagtatcgattatggcggagataccgatacggttgctgccttgtgtatggcgattttaagtaacaaagaaaactgcgatgaaaacctgcccgcatttttgtatgaaggtttggagaatgatacatttggaaaagactttctaataaaattagatgcggctctcgaaaataagtttaattaaatcatgaaaagaacctttgtttttggggatattcacggcggattaaaagcattaattcagttgttagagagaatggattgctcagaaaaggatcggtttatttttttaggagactatgtagacggctggagtgaatcaaaacaattaattgattttctgattgatttaccccaaaaacaggagtgtatttttatcaaaggaaatcatgatgtctggtgtcaggagtggttagagaatgatgttatagacgatatttggtttttgcatggaggaaaatcgactatagagagttatgtcgatattgaacgttcggaaaaagaaaaacatcgccattttttcaatactatgaaagattactttgtagacgaaagtaacaatttattcattcatgccggtttttcgtccatgcatggcccggagaaagaacattaccaaagcaattattcgtgggatagaacgttgtgggaaatggctttgacaatggataagagaattaaaaaagattcgctttcctatccgaaaagattgttactttatgatgagatttatattggtcacacaccaacccttcattataatgtagagattccaatgcaaggatgtaatgtgtggaatgtcgataccggggctggcttttatggcagattaacggggcttgatgtagagacaaaagtattttggcaaagtgatatagtacaagagctttatccaaatgaaaaaggaagaaataaataattgaaaaaataacgaagaaattttatgaacccattattattaaccgacggttacaaagttgaccacagaagacaatacccagacggaacaacattagtatattccaactggacgccaagaaaatcaagaattgaaggtttagaagaagttgtgttttttggattgcaatatttcatcaaaaaatatatcattcatgattttgaggccgatttctttaaaagaccaaaagaagaagtcgttaaaaaatacgctcgcagaatcaacaattatttaggggaaaatcaggttggaaccaaacatattgaagatttacatgatttaggatatattccaatggtttttaaagcgttgccagaaggtgttagcgtgccattaagagtacccatgtttacgatgtacaatacgcttccggagtttttctggctaactaattatttcgaaaccttattgtctgctgtagtctggttgccttgtaactctgctactattgcaaaagaatatcgaaaagtattggataaatttgccgacgaaacagcatcagttcctgaatttgtagattggcaggcgcatgatttctcaatgagaggaatgggtggaatcgaggcagcaattacttctgctgctggacatttattgagttttacgggttctgataccattccggtaattgacttttttgaagaatattataatgctaactctgataccgaattgattgcaggttcagttgcggcaacagagcactctgtaatgtgtatgggaaccactgaaggagaatgcgaaacgtttaaaagactggttacagaagtgtatccaaaaggaatcgtgtctatagtttcggatacctgggatttatggaaagttctgaccgactatttaccacgattgaaagaagaaataattgccagagaaggtaaagtggtgatccgacctgatagtggcgatccggtagatattatttgtggtaatccaaacggaaaaacagcagaagagaaaaaaggagtaattgagctgctttgggatgtttttggaggcacggttaatgcaaaaggatataaagagcttattccgcagattggtgccatttacggtgatagtattacggtagcaagggccacccaaatttgcgaaagattaaaagaaaaaggatttgcttctacaaacgttgttttggggatcggttcgtttacctatcaatacaatacccgagatacttttggttttgcaatgaaagcaacttatggagaagttaatggagaaggcagagcgatctttaaagatccaatcacagatgacggaactaaaaaatcagccaaaggattaatgaaaattgatttaattgatggggtatatcatttaacggacaatgtttcctgggaagaagaaaaacaaggcgaattaaaagaagttttcagagacgggaaacttttaacagagcagtctttagcagatattagatttcgagttaaatctcaaataagcgttacattataaaatgtaaaagcctgaattttgaacatgccccaaaaagttagacactatttggggcattttttatggacttgtgattcctcgttcctcggaatgacaagattgcgtagaaattatttcttgtaaaaattattatgatcgatatattcccaaacttttggcggtaaaagaggctgtatgtttttgccttctttgatactgtttcggataaaagtagaagagatttctacaattggagcatcaatgatatgcacttttggatgcgattttaattcaatgttttcctcttcttcagatattcgaggatagacataaatatcgtaatctgctaaaagcacttcgtagtttttccatttatgaagcgtttttaagttgtcttcgcccatgattaaagaaaagccatgcgatggatacttttcatgcaaatgaaccagtgtattgaccgtataactaggctgtggtaatttgaattcgatgtctgaaggtcttatttttggataatcttcagtggccaaatacaccatttgcaagcgttggtgatcgtctaacaaggtagatttctttttaagcggattgtgtggggtaacaaccatccatatctgatctaaatcggcaaattcagccatgtggttggcaatgattaaatgaccaacatgaatggggttatacgttccgaaataaaggcctattttcatggtttagtaactggtaattagtgaaaagtgattagtctttaagtgttttgcaaaaagaattaatcatttttgattcttcttcaattagatttagaatttctctataaagaacttcgttagttataaatcctagttcatttgcaattactaattgagtttcaatctcaaacagagaccctctggatatatttaggaaatgggtaaatgaattatcagtattccggccatagccttctgcgatgtttgatggaactgaaacagaagccctttttaactgactagtgagtgcatataattcttcttgcgggaatgattttaccaactgatacgtcagggaaacaattttaatccctttttgccaaattagtaattccttatatgatttaattccactcatgtaatattataatttaaattcgagatctactatttatgacgaaagactagcaacaagtaactaagggctaatgactagtaactaatgactaataaactatttcgaaataaaatcttttaccaactgatatgcttcttctttagcggtatctaaatcgtaatttttgataatcgtatcaaattgcggtgcagttgccagttcaaccgaagcctttgcaattcgcatgtttattttgtcatcactttcagtagaacgttgttttagtcgacgttttagttcgtcaacacttggaggttttacaaatacagccaaagtttgttccgggaatttatgtttgatacgcagtccgccggccacatcaatatcaaaaatcacatttttacctaaagcccagattctttcaatctccgattttaaagtaccataaaagttgtcgcgatacacttcttcccattccaggaattcctcggccttgatgtgtttcttgaattgctccagtgaaataaaataataatcttttccgtgttcttcctctccgcgtgggtcgcgagacgctgctgagattgaaaattctaaatttaaatcttctttccccaataaatgctttactatagttgttttccccgatcctgatggtgctgaaaaaacaattaattttcctttattcattaatttatgctttaggctttaggcggtacgctttaagctcacttactctatgttttttttgcttaaagcctattgcttaaagcttgcggcttttaaagtacatttaaaacctgttctttgattttttccaattcatccttcatcatgacaaccaatttttgcatctgcgcatgattcgattttgaacccatggtattgatttcacggcccatttcctgagtgatgaatccaagttttctaccgttagcttcagaacctttaatagtttcaaggaaataatctaaatgattggttaaacgaactttttcctccgtaatatcaagtttctcaagatagtaaatcaattcctgttcgaatcggttttcatccacattcactttcaattctgaaatagcagtttgcagacggtctttaatcgctttaatacgttccggatcaagtgccagagcgtcattcatgtattgacggatatttgatattctaagattgaattctttttcaagagattcgccttcgtcttttctaaaagtcagaatgttttccaaggcctcttcgatgatcagctgaatttgttcccagtcattttcatcaatttcttcgcgctccgtctttagggtatccggcattcgaacggccattttcatcagttccgtttcgtctgcattcgggtaaacttcttttagttgggcgatgtagttttttacaacaggaacatttaccttagttgaggtttgttcagaagtactttcaacgtaaattccgaaatcaatttttcctctttccagtttagtagagatttgagttcttaaacctagttccatttcgcggtacaccgatggcattctaacatttaaatctaaacctttactgtttaaggattttacttcaacggtaattttttttgtaggcaattgcaaagaagctttgccaaaccctgtcatagattgtatcatataattgagtataaaggcgcaaagatactaaaaaactttagagtgaggttttctagtttctattgccttatttttaaaaggttttgggcgttcccttcggtcgggctattcgtttcaatctttttttgagcagaaaaaactcaaaaaaaggatttccacttctatccctaacgcaaaccgggaatctttacagcttttagctaaattattgtcctaaggctttcattacctgtagaacattctgctgactgttgccgatgtagattttgccgtcaataataaaaacaggacggcttaaaaaagtatagtgttccaagatgtattttttaaaatcggcttccgttaaagatttgttctttaaatccatcgatttatacaattgtgcttttttgctgaacaaagcttcgtaactacccgaaagttgatacatttcttctaattccgttgctgtaatcggattttgtttaatgtcgtgaaaaaccaggttattgccttccggtaatgctttaatgatttttcggcaagtatcgcaggatgctaagtaatatattttgttcataagtttaaatttaagagactacaaagaaaatccatttgaaacttaaaattgcctaattttagaaaaaaaaataaaaatatgaacccagtttttgaagtacaaaagaccattagagagattcttttgaaagttttagacagtcattcattagaacagttaaacaaaattccaccgggatttaataataatatcatttggaatatcgcacattgcgttgcttcacagcaggctttggtttataagttatcgggcttaccggttaccatttctgaagagtttattgctaaataccgaaaagatactaagccggaaggagacgtttcgcaagcggaagttgataaaatacgggagttgctttcgactactttaaagcaggttgaaaatgattttgcggcaggtatttttgtgaattataatgaatacaccactagtttaggatataccctgaagaatataaacggagctttggattttaataattatcatgaaggcgttcataccgggatagtaatgagtattcgaaagtttgtttagatcttttttgggacaactcaatttacgaaaaaatccgacggtttctaaaaaactgtcggattttgtattttaaaaggatgttattctactatagtttcgattgtaactttcatggcaccgcttcctttacttttcgtgatttccataaaggctcttttggatagatcgagatctcttgttcgaacaaatggaccgcgatcggtaacttttacaattacaaattttccgtttgcttcattggtgacttttattctggttccgtaaggaagttttttgtgtgctgcagtgtaagcgctgttgctgaatcgacttccgttagctgtttttttaccattaaaacggtcagcgtaataagaggcatgtgcattttttttataaggttttaatttcaagcccttatccgtaaaaacagaatcagttggtattgcaattaaattaggtctggcagttttgacagtatcctgagtaattttaggttcagttgcaggctttgtttggcttataacataggtaaaacaacttaaaaaagttatagtaagtgcagtgagtaaaatatgttttttatttctcatgttttattttttttcagacttggggagtttgtacaaataatatgccgagataaaaaaagccctctttttagggctttaattggttttttcttagaaccataggttccatgggattctgcttaaaataagcaataatcctaatccgtaaaaaatagcaaatgttttaaactttgcagcgctatcgattaattttttatgtttagaccatccgatggtgatcaaaatgatagcaataatattgattaaagggtgttctaatgaagtaagtctaagtgctgcatcagacatttggccaaggacagctttccctaaaggagatataaaataaagaataagaccgatcaataactgcgtatgagttccaatcaaagcaaacaaggcaattttgcggtctttggctgtgaagtcttttttagaagtaaggccaaggatggcatttacaacagcaattaataaaagcaacagcgccaaataagcccatcctgaatggaatttttgtaaaaaatagtacataaattagattttttgataaaacaaatatagcaaaaaagggtataaaaaaagcggcatcagactaaaagtcaatgccgctttaggtatttatttagattctaaatattagaaatcataacgtagagagaagttccatgttcttccgaaaccgaagaatacctggttaatgtttgctactccattgtaaagcattccgttagatgcgtaagttccttttgaaccagctggttggccagaagctacaggaaggttgtcatcagcgaaaaagtttgttcttgattcagcgatgtaaattttatcaagtacgttgttaacgtttaatctgaagttaactgatttgtctttgttttttccagttaacattttgtatgagaaaccagcatccatcaaaccataagaaggcaattgtaatgctcctttgtttgttgcagatgtaaaactagttgggttgattcctgcatataaattgtcgttgaagttatagtttgcatcaactgttactcttgttagaacttcgtaagatgctcctaaagaggctgtcatttgtgctgcgtcacccacttttactttgtccatgtaaactgtagttccttggaatcctggtacaggtgagttgtctgcttggaagtaagcattaactgttgcatttcctttgtattcccaaataccataagagaacattcctgttacttttaatctttctgtaatgttagaagatccttcgaattcaattccagagtgaacttcgttaagtcctaagaactcagtgtaagttgaatttgcaggtgttgcagtagtagttggaagtgcattaccttttaagtatctgtcattccaagtagtgttgtaaacgtttactgtagcgttgaaaaatctagaacggaaaccatatccagcttcaaatccaataattttctcgttagtaaggttagggtttactgttgatctgttgtttggataaacagagttaaagaaaggttgtttggagtaatatccagcgtttacatatacgttgcttttttcgctaatattgtagttagctcccgcttttgcattaccacctaataagtttttgtaaggagtagaagctaaaggatcagttggtaaataaacgaagtcatcttctcttttgtatccttgttgagaaattgctccctgaacaaatgctgttaggttgtctttagagtactctaattgagtaaataaaccataccattttacattaccagtactgttgaaagatactttgtcgtattttctattttggaaaacattccattgaacatcagtatcgtaagtgttagttaactgtcttccgtttggtttttgactagcaataaagttgtcaaaatactcaccaccacctaataaatcatttacaactgtaaagtggtatcctttataagttcttccgtcaaaaccgaaatctaaagttaaggtattagaaagtttcttgtttaagttaattaccgcaccaaaccagtcatgagagttgatagatgacgtttgtgagataccagaagtgttgatatttgtgcttggattataatttgctacatcagaacctgcattaaaataagaactgttttgataaactccaccaattttttgtcttgtttgaggtcctgtaaaacctgcgatagtaactggttttccagagttgtaagcataaattttatcatagtctactaaaccgtcagcagttctgaatgctatagcatcattgtatccttttcctttaattcctccagttgcactagctcctgcaccacgtcccatagaagcgtaaacaacagaagaaagttttgtagtttcgttgattttataatcccagttgaaagaagctactggtttgtggtagtagttttttctaatgttatattcttcaccattcaaatatcctgcatcaggattgtatctgatatttggttcgttatttctaccgtattgttggtaagctgcgattgtagatactgtagatctttggttgtgccattgtggagcacctgttaccgtaagttgaaagtcgtgtttaccacttttgctgccatatcctaaagcaacatagtagttagatccttcaaattgagttccgttaacatatccgtctcccattgtttttgataacaaaacagatgcagaaagaccgttttctaattttccggtattgtatgaaccttgaattttgaaatttctaccgtttccgaaaccagaagagaaagatcctccttcttttctgtcagaagctttagttacaatgttgatcgttcctcctacagaaggagttgcaagtttagatgctcctaaacctctttgtacctgcatagcagatgtaacatctgaaagaccagcccagttactccagaaaacagaaccgttttccatgtcgtttaccggcataccattgatcataacagcaatattgttttgagtaaaaccacgaatattgattctggcatctccaaaaccaccacctgcttttgttacatacacagaaggagtgtttcttaagatttccggaaattcctgagttccaagtttttcctggatctcagcagctttaattgtagaaaccgctactggagtttttctgtcttttgcgatgtcaacgattgtgctttttacaacaatttcgcttaattcgttagaattagaagtcaaaacaattgttcctagattagtagtttgaccatttttaactgaaaatctaagagttaagttctcgtaacctaaaaaagaaataacgatttctcctgtacttgttgttgcattaagagtaaatttaccgtcaaaatctgtagaagtagcaactgtagatcctttgatcacaacgtttgctcccggaagtgaacccactccgtcggtaatcataccggaaatttttccttgagaaaatgcggttgaaactatcatgaacaatagtccagtaagtaaccaatttttcattgtcttcatttgttaattagtttattgtttttggcaaaattataacaataaaatcagataatgttatcaaagtgttaagaaaagaaagatttgtataatgtgttgcgcattaaaatgatttttctaatttttgctagataaaatgtagtttttgtaaatttttagacactgattttgttaaaatcgtaatgattgtaatggtcttgtagtgctaaacttgcaagaacgcgttgtttggctcctttttcgcaggtttacgtacgaaaaaacgccttaatttttattaaatcaaggcgtttcagtatgttgtgaaaaaaggctttcgttaattttatttgttcttcaaaaagtgatttaacaaaaaagaagtcgagctgtcatgattctttacggtcgtactgttaatttcatccaaaatagaattcgctaattgctttcctagctccactccccattgatcgtaactgaaaatgttccaaataataccctgaacaaaaattttgtgttcgtacaaagcaatcagtgatcccaaagtttttggagttagtttttgaattaagatcgtgtttgtaggtttgtttcctgggaaaactttaaaaggcaataagtaagctgctttttctgctgataatccttgtttgtcaaattcggactgaacttgtgcagctgtttttccgttcattaaggcttccgtctgagcaaaaaagttggacatcaatttatcgtgatgatcgttgtttccgtataaaggttgaacgaatccaataaaatctgttggaattaattttgtaccctggtgaatcaattgaaaaaaggcatgttgagaattcgttcccggttctccccagataattgttccggtttggtagttaaccggttttccgtcacgaccaacactttttccgttactttccatagtagcctgttgcaggtagggagctaatttttgaagatattgggtgtatggaatcaatgcttcgctttcagcaccaaagaaattattataccaaatgcttaacaatgccagaattacagggatgtttttgtcgaatgctgttgtcttgaaatgttcgtccatttcattagctccttttaaaagttcgttgtaattgtcaaagccaatcgccaacgaaatgctcaaaccaacagcgctccataaagaaaatcttcctccaacccaatcccacattgggaaaacattgtcaggattaattccaaattcagttactttttgaatattggtggaaaccgcaacaaaatgtttggcaatatcttcctgggaagccgatttcaaaaaccattcttttatcgtttcagaattagataaggtttcctgagtggtaaaagttttggaaacaataaggaataaagttgtttccgggttcaattttttaatcacttcgtttacatggtcgccgtctacattagaaacaaagtgtaagtttaagtggtttttgtaatactgtaaagcttcaactgccataaccggcccaaggtcagaacctccgataccgatatttactacatcagtgaaagcttttccggtgaaaccttttctttctcccgaaataacttcatgcgtgaattgtttgattttgttttttacttcataaacttccggaattacattttcgccttctactttaataactgcagattctggtgcacgcaacgcagtatgcaaaaccgctctgttttcagtctggttaatgattgctccttcaaaatattgagagatggcttcttttaatccaatggaatgggctaattccagtaaaagagaaacggtttcctgactaatgttatttttggaatagtcaattaaaaagtcattccattgtaaattgaatttttcaacacgcgcattgtcctgttgaaaaagttcttgtatcgtagttgtatgagttgcgttatagtggttttgtagatttttccacgcttcagtcccggttgggtttgtagtgtttaaagccattttttgtttaattgagaatgtggttataaaaaaacaaaaatactgaaattagttctaatagctttaagcttcacaattatataacaaatagttacgaaaacgatatatgtgtttatttgttccgaattcttgccgttattataatggcaccatcgttttctttttcgttgtaaatgatgcggctgctgttttcatttaaaaaatctatacttatgatgtcagctttttcaagaggcaaaattatagtgtcttgctttttgtcgtactggaacggaactccgtttatcacaattaaaggcgattttgtaatgatgtctttttcgaatgcctgttggatggattccgatacaaagtattgattttgtttcttatcgtttaaaagaaaagtgtgtggattagagcaccccacagctattgtacaagaaagtagtagtaagaatcgtttcatgcgtcgatgtaggatttgataaatacttgtttttaagtggaagttttaccaaattttccaccagggctttttgttgatttcgatgcgctttttgattgtattgatttctattctttgaagttcctcttttttgatagttgaatcgtcaaagtgtaattcaccggaaagactgatgccaataggggattttgttttttctctccaaacttcggtttgtaattccggaattagaggagcgttgattttagcggtaaatttttgtcttgcttttgttgtaatttcttcttcgagatttgaaatcgaatttttaaaaagcggaagtgagtttccgggaatgttgaggaggaaaatctgggttttgttgtcgattttacaaatgtccaatactttaaagaaagaattgtcatccagaagagcatgtccgttttttgccgaatccggattgaatttggataaatctcttgctccggcacttgcaattaaaaatctacagtttccggaaagaccgccaccaataaaagacatgtctgtaaagtctttttcttttaatatttgtccaatttgatacgcagtaagtaaacgatcatctaaagtggtgtctctgtagaataattttaaatctgaaaaagtttcatcaagaaggtctttaatgcgtttgtttttcatgtttgtttctatattaaggataaaaacagatttttatagattcccaatactgtccagttctctcttcaaaggttctatttgctggaagaaacgggtcttgtaatttccggttaaagattctccggttggtaaattaagtctcaaagcatctacctgtacgccatttttccaaaaacggtaacaaacatgaggtcctgttgcaagccctgtgctgcccactaatccaatggtttgtccctgtgtcacacgctgaccgcgtcgcactaaaattcgggacatgtgtaaatattgagtagagtaggttccgttgtgttttacttttacaaagtttccgtttcctgccgtgtatcctgttgcttctacaattcccgaggcagttgacgaaattggtgttccggttggagcggcataatccgttcctttgtgggctttccaggtgtgttgtaccgggtggaatctgttggctgtaaatcgcgaagtgattcggctgaatttaatcggagtttttaagaaaaagtttttcaacgttttcccctgatcgtcataatattctatttttcctgaagtagtgtctttttcaaatgggaaagcataaataattttgcctttatattcgaaaaaagcggcttcaagatcttcaacaccgtcgtaagttttgccattaataaaacgttctgtgaaaattaatccataacgatctcctttttttagtttaaagaagtcaatcgaccatgaaaaaactttggtaattctgctggcaagagcggcttccacgctttcattacctaaagtttcagaaagagagctttttaaaactcctccgataattttacgttttaaagtgaccggttttatttttttgctggcctttgcaatactgtctcttacatctattacataataagtcagcggatccggctgataaataaaaacctgtaacttgtttgttttgttttttgagcgaagtatagtataaggtttgttgtagcgaatggtccttacattgaaagaatcctttatttgttctacaacatcatagacttttttgtctccaatattctgactctgaagaatagatccaaatgaatctccttttttaatagtatcgtgaataacattgaaatcggcgtaattaaaaccaaattctacttttttagtttttggtttagtgattttagtttcaactttttcggcagttttattgcatgaaaatattgagaataaaacggttataattacgaatgcttttttcaaacttttaaatttttttaggaaattaattagctgtttcatttccccaattggacaattcttcttcggtccacaatttaggaaaaaagatgcgtctttggtattttgggtgcatatatttttgccaatcacttcctccggtggcttctccatttccttttccgctttccagtatgtattttcttgcagtatttaaatgctgcattacccaggtgatgtttaccgttttgtcgtaatgacgcatcgcatcaattaactcctgattttgttggtcctctaaaggtaactgagtaaatttctgccagatgttttttgatttaaaagttgacatttgtcttaggaactgatccttgtacttgttttcaaattcctgaagcaaatatgatttttctccggtttgataatcttttccggcagcctgccaatataaatgttcgaaactggtttctagcggagtattttcgtcaaagtttgatttgtatcggcgatcggttaaattgatcacatctgtcgatgcaaattcgattaatcggtattgtgcactttgaaagccgcttgcaggagtcagtgtatttctgaatttcatgtattgatccacttccattccgttttccatgatgctaaacgaattggtcagcatgtcaaagtatctcgttattcttgataatctttcactgaaaaaggcaacctgaatagcttgcgtgttggaaatttggtcaatttcccataatatcattttaaagatcaattcgtttacctgatggtacatgatgaaaaccatctcgtcaggaagcgtagtgcgttgggtttgtaaacttaacagggcatccgtttgtatgtagtcccagtaggtgataggttttgaccaaagcaatccttctaattgtacatcggttttttgatttatagcttggaatttaaggtcaatttcttttaaaattgattctgaatgatcagtagggttcattatttttttgctttaaatggattttttaatcctttatattcgtcaaggtcggctttaagtgatccaacagccaaatctgcttttatgcgtatcggaactttgttctcgtcgtctgtaatccaaagggttacgctttctttttctttgaaaactctcccggtttgtaccagtggtttgaaaaccattgaagaaacagtaccaaatttagttgtaatatcctgtcggcctacatattttaacttaaattttgtgatttcatcatcaaaaaacatatcaatggtgatggcctcacctgatttgagtttgtctatgttgggatggtttctcaaataataaaaagaagagataatatcctgaacattgtcggtgattacaattgttttttcggttttacgcttgtaatcttttactaaaacttttttctcagactgatcaaaaaaaccttcctggtttttggtgtagcctccttcgtttatttttctaacgtaacgataaggatctccgttttgtttgtcgaaataactttcataaaggtcttccaccttaaagaaaaattttgacattccggtggtgtatcctttacctacagcatgaaaaacttttttattgttgatcgttgcgtccttaatttcaagggtagcgtaaccggcgtttatgattccgtaatgaattctgaatctgaagtattctccggtgtcaaaagcatcttctttttgagtgtcgaaacctagggtcgtaagaactaatatgagcaggactatttttttcatagtacattttttacatttcactattaaagatatataaatgcaaattttattccaaatgtatcaaaacaaaaaaactccgtcaaggaatgacggagtttttatgctattaactaaccaaaaaactataaattatgaaatttatatcaattcggaaggaaaccaccccttcctgatttgcgagtgcaaagatagatacaaagttcaaaaaataaatgttaaaaagtgagtttaacataacatttgcataaaaaccatcattttacagagaatttttttgcataatgtaaaaaaaatgcgtttttacaacgttcctctcaattcctgctctctctcgattgactcgaaaagggctttaaagtttcctgcgccgaatccttttgcgcccattctttgtataatttcaaagaatagtgttggtcggtcctgaacaggcttcgtaaatatttgtaacaagtaaccgtcctcgtcggcatcgaccatgatagccagcttttcaatttcgttaatgtcttctttcatcatatccatatgcacgcctaatctttcaggaattgcctgatagtaagtgtgaggaggagctgataaaaattcaacacctcgtgctctcaattgtgatacggttttgatgatgtcatctgtagcaatggcaatgtgctgaattccgggaccaccataaaaatctaaatattcttcgatttgagattttttctttccttctgccggttcgttaataggaaatttgattcttccgtttccgttagacattactttgctcatcaatgctgaatattctgtggtaatttgcttgtcatcaaatgacaggaaatttacgaatcccataacatcttcgtagaattttacccaggtattcatttcgttccagcctacatttccaaccatgtggtcgatgtattttaaaccggttggctcgggattgtaatccgatttccattcctgataccccggaaggaaaataccgttgtagttttttctttctacgaaaatgtgaaccgtttctccgtaagtgtatattcccgaacgaaccacttctccaaattcgtctgattcaaccgttggttccataaaagaacgagcaccgcgtttcatcgtttcttcgtaggcacttctggcatcttcaacccaaagagcggctacttttacaccatcaccgtgttttttaaggtgttcgtgtattggtgaatcctgagttaaaggtgttgttagaacaattctgattttgtcctgttttaaaacataagaagccttgtcctttactccggtttccagtccggcataagctaatgactgatatccgaaagctgttttgtaataatgtgccgattgttttgcatttccgacgtagaattctacatagtcggttcctaataacggaaggaaatcctgtgctccttcaaagattttttccaatccgtattctactgattttacttcttttgacataatgtttatttgtttaatcggttaatcgtttaattgattgaaccgtagtgttgtttttaagttttttttaccgcaaagtgcgcgaagttagttcgcaaggttcgcaaagttggaataagaatcttagcgtaaaatccttgcgaactttgcggttagattgatttagtgaattactccgtccaggatttataatactgaccgtcgtcaagacccatggcttcttctgtaaccataagtgggcggaaagtatcaaccataacggctaattcctgtgtttctgtgtgaccaatgctacgttccatcgcgcctggcgcaggaccgtgtgggattccttttgggtgtaaagtgatatgaccctgctcaatgttgttacggctcatgaagtcaccgtctacataatatagaacttcatcagaatctatattgctgtgattgtaaggtgccggaattgctttcggatgataatcgtaaagtcttgggcagaaagagcaaacgacaaaagtagccgtttcgaatgtttggtgtaccggaggcggttggtgaacacgtcccgttataggttcaaaattatgaatcgagaatccgtatgggaaattgtaaccgtcccaacccacaacatcaaatggatgtgtcgcataaaccacttcatgaatcatgccctcttttttgattttaattaaaaaatcgcctttttcgtcatgtgtttccagttcgtttggcaaaataaagtcgcgttcgcaaaatggcgagtgctctaaatgctgtcccgattggtttttgtaacgttttggggtataaaaaggggagtaggattcgacataaaaaagtcggttttcttccgtctcgaattcgatttggtaaataatgcctcgtggaataattaagtaatcaccatattcaaacggaatgttacctaacatggttcttaattttccttttcctttatggatgaaaagcatttcatcagcatcggcatttttgtagaaataatttcgaagtgattctttaggagcagccagtccaatgatacagtctttattaaccatcatcgctttacggctgtccaaaaagtcattttcaggttttaattcaaaacctttaaaaagtaacgattttatattttttccgatggcaatttttggctcaacggaataggaatttaaaatttcttttacctgagttggtctgtgaacatgataagataatgacgagtgtccgtgaaaaccttcagttccgaataactgttcgtagtaaaaacctccgttaggtttttcgaattgtgtgtgtctcttttgagggaagtctccaagtttgtgatataatggcatggcttttctattagataattttaaaattagataatttgaaaatttgaattgtgtgaacagataaccagctcaatttcttaaaattgaccaattatctcaattcgatagcttcactcaggatttctcttgatgaggaattgaagatactctaataaacctgtccattttgttttcattataacaaatgtcgtaatttttgctgagtaaaattataaattatatcatttacaaacatgattttttttaattttttttgatataatttttaatgggcaaaaaaatagtacaattttgttgaaccattctttgctttagtgctaaaataaaaacccaatactaaaccaggtatagcttttagacatttccggagaccaggattgtttaatctcgattgggccaatgatggtttccagtccataaccaacagcatatccggtatattttggcattgagatccagtcgaccttagtaaaaatatcatttcccaagttggcaaagttagcagaaagatttacgtgattctttttgaaaatttcataatcgagcgtaatccccgtttttataaagctgtttccggctatacttagaaaatcgtatccataaaaataattgaagttgttgattttgctataaccgtatcctccgagtataaagtcgaaaaacggaacgctgtcgctgccaatgttaaaccctgcgtcggcgtcaattttgaaagtagcctttctgaagaacgtttttacgaaagcaatttcggcctttgcaatcgagaatggtttaaattgacgtgtatagtcagacgacgctaagtaggtttgtaaatcggtagagaagtacaagccggaacgagggaagcttttgctgtcgaatgaatcgtattttaagtaaccaaaaagactaagatagctgctcttttcaatagtatttacggtattggtaagtgttggagagtctatttttaaatatttgtattcaaaaccaccccccattaaaaatttttgtacaaagatggtttgaaaataggcctgattggtaatgtctaaaaagtcaacattaatcagatttacatttggattctgtgctgttaaggtattaatgctagtggtgacattccgattaaattgattcaaacgggactgaaatccaaaactgatattaaaaccgttttctatatagtagttgaagtcgtacctgaagttatctcccaaaataacatcaagcgaggtaacatcattttttaaaaaggtctttttgtgggtaagatttagcagaattccacttttgtacagcccgtcataatgcagacctagttttagaaaagtctgagtgggattttcttttaagacgatatcaagatcgtcctgttggtcatccggctgtaaacagtaggaaatagtactgaagttctgggtggcattcaggttattgattccggttttcagatcattgtaagtaatcgtacttccgggtttaaaacgcagttttccgcgaatgtattcttttgtgtaattctcaaggttttcactgtttatctgtttgatttgcagtgtgtcactggcaatttttagtttaggttttttataaaaatgagcttcatcggttaaagatttgattctttcatagaccgcaaaagctgcttcttctccttttcggataatttcttctcctttgtcaaatgaaattacgccataatcgcgaatgtccggtttgatataaacatcggtatccttgattttgtttttcatcttatcgatagactgcaaattggtaatctgtacgagtatcttggtcgcatttttcagatttttgcgattcataagatcgtcctgaacatcgacaccaataataatatcagcacccagattacgaacttcttttatgggatagttgttgactacacctccatctactagtaaatttccttcaatttcgacaggggtgaacagggaggggaatgctgaacttgccatcatagcctgaacgagatttcctttgtttagtaaaacttcttctccggtttcaatattagttccgatacataaaaaaggagttggaagttgattgaaatcacgtacatgacgtacattccgagtaagaccacttaacaaattgtaattgtacattccttttgaaagggcttccggaatcccgattctgaagttgctaaaaggtaatgaaatggcatataactcatcattttttttgccatagaagtttttggacgatctcggtatgtaatcgttgatgagttcatcaaagttggttttcttgaaaatggaatcaatttgagaggcattgtatcccgaagcataaagtccgccgattatagatcccatactggtaccaccgataaagtcgattttaattccggcttcttccagaacttttaaaactccaatatgagcgaatccttttgcgcctccaccgcttaaaaccaatccgattttgggtcttttaatgctgtcttttttttgatcctgtgaaaatgttttttgcggatttagaagtaacactataaaaaggaatagtgctgtgctccagatcgaaacagacaactgcgaactacaaagaaactttccttttggaaagaatagaacaactttagaaacatcttttttcagtggagaaaaaaaaggtttcgatgtggtatttttgtggggcagttgatctgggcgcataaagataactagttggttttgtaaaagtcgacaatttttttggcttttgatacccctattacatcagatatttctttttcggtagccagtttcaatcttttaacacttttgaaatgttgtattaacgtaagcattgttttttcgccaatgccgggtatgccttctactgaggagttaagtgcggctttgcttcgtttgtctctgtgaaaagtgatcccaaatcgatgcgcctcatttcgcagctgctgaatcacttttaaggtttcggattttttatcgagatacaacggaattgaatctccagggtaaaacaattcctcgagacgtttcgcaattccgatgatcgcaattttgccgcgcagttcgagagcgtcgatactttttaatgctgcagaaagctgtccttttccaccgtcaatgatgattaattgcggcagtggttcgttttcatctaataaccttttgtaacgtcggtagacaatttcggtcatcgaggcaaaatcgtcaggaccttcgacggttttaacgttaaaatgacgatagtcttttttgctgggtttcccgtctttaaaaactacacaggcggctaccggatttgttccctgaatattcgagttgtcaaaacactcaatgtgacggggttcaacaggcaatcgcaggtccttttgcatttgtgccatgatccgattggtatgtcggtcaggatctacaatctgtaattgtttgagctgttcgattcggtaaaatttcgcgttccgaatagacagttctaatatttgttttttatctcccaattgaggaacggtagttttgatgttttcacctaaatcaatttcaaacggaacgatgatttctttagacaataactgaaagcgctcacgtaattctataatggcaagttctaataattcttcgtccgtctcctccaactttttcttcatttctaaagtatgcgaacgtataatcgatccgtgtgagatttgaaggaagttaacataggctgagctttcatcggaaacaatcgagaaaacatcaatatttgtaattttcggattgacaatggtagatcgcgactggtaattctccagaatttcgattttttcttttattttttgagcttcttcaaaacgcaagtcttttgcatacttggtcatcagtcgtttgaagtctttcatgctttctttgaaattcccttttagaatttcgcggatcgcatcaacctgtctttggtagtcttccagagattcaagtccttcacaaggtcctttacagttaccaatgtgatattccagacagactttgaattttccggaatcaatattagacggactcaaatcaaaattacaagtcctcaaagggtataattctttgattaaatctaaaatagtatgtactgttttgaaactggtgtaaggaccaaaatattcagaaccgtctttgaccattcttcgggtagaaaatattctcgaaaaaggttccttcttgatacagatccaagggtaacttttgtcgtcgcgaagcaaaacattataacgcggttggagtgttttaattaaattgttctccaataaaagtgcatcagtttctgtgggaactacgatgtgtttgatggttacaattttcttcaccaaaacattggttttggcggtatcgtgtattttattgaaataagaggagactcttttttttaggttcttagcttttccaacatataaaatctttccgtctttgtcataatactgatacacacccggattgtccggcaaggttaggatttgaagatctaaggatgatggtttgtgcattctgttttgtttctgaagatagctgttaaacttaaaaaaaccttttgaggtcttaaaaagcttaacattgatttagtttcaaatttacgaaatcaaaagaataatttctatatttagattttataattccacatgaaaaacagtaaacccctgattatttttggcgaatcagttttgccgggcgaaagtaaaacaataaacgttgaaattgctcgtctgcataccactacaaaattgaatattccgattatcgtacgccgttcaaaaattgaaggtccggtcgttttattttcggcaggaatccacggtgatgagattaacggtgttgaaatagtccgacagctgatcagcaaaaaaatcaaccgtcccgctaaaggaaccattatttgcattcccattatcaatatttacggttttgtaaataaatccagagaatttcccgacgggcgtgacttaaaccgcgtttttccggggagcaaaaaaggatctttggcaagccgtttcgcttatcatatcgtagcagaaattttgccaattattgattatgcggttgattttcatgccgggggagcgagccgatttaatgttccgcaaatcaggattacggagaacaacccggaactgaaagaacttgccgatgttttcaatgcgccttttaccttgtattctaaaaatattagcggttcattccgcactacctgtgaaaaggccaatataaaaatgctgctttttgagggcggaaaatctctggatattaatgattcggtggcaaatgaaggggtaatgggagtgaagcgtttgttgaattatttgaatatgctggattcaaaacatcttgtcgaaaccgcagaagatccttctatctacattaaaaattcggtttggctgcgtgcgaaatgttcgggtctgcttcatgattataacaggattggacgttttgtaacgaaagggactatcttagccattattaccgatccgtttggtaaatttgaacaaaaagtaaaagcaccgcatgacggatttgtgatcaatgccaatcactcgcccatcgtgtacgaaggagatgcgatttaccatatgtctaaaaacagagacgagtatgccgacgaataaaaaagaattacgattacactataaaaatcttcgaaaagaactttcggaaaatgatatcgaagagaaaagtctggctattgccaataatataatccaattgtctatttgggataaaatctattatcatgtttttcttccgattgaagagcaacgggaagtaaatacagaatacgtattgcatttgctttccggaaaagataaagaaatagtagtttcaaaaagtgattttgagactcgtggtatgacgcattttttgttgaccgataataccaaaatcagaaagaatgaatacaatattcctgaaccggtaaatggtttgcaagttccttctgaaactatagaggtcgtttttgtcccgcttttagtttttgatgtttttggaaatcgggtaggatacggaaaagggttttatgataaattcctgtcagaatgcaaacccgggacaattaagattggcctttctttttttgaagctgaaaatcagatcgaggatgtttttgaatcagatgtgaaactggattactgtgtgacgcctttaaaaatctatagtttttaattgtaaaacaagaatttgccataagtaaacttaagaagtatgcggttttgaacttaagtttatttatagtatcgatgcgattccgaagtgattgatacccatacaaaaaatcccaaacaccattttaagaggggtgtttgggattttttcatttgattttttttgaatatttattttacttcccgaatggtagaggcatccatccagccttccgttccatcagttaattctatttttttccagcctccaacggtttccaaaacatatactttggctccttcgtgcagtagaataatggcagaacctgatttctgaggttcgctgcgaacttcacttaattcggcaaaaacaattgcaggacggtcgttgtcaaaatgatttttttcagacatccctgccgaaacacttaaaagcaaagcgatcaaaagaacaaacattccaatgaaataaattcttttcgagagcgtaagctgtgagaagtaatagccgataaaagtcagtaagaaagcaaatgcgattgcgatagaaattattgcccaggtattataatcgaagattccggtaaaattctgaatcagttttgcaaaacctacttttgggacttctttaatttcatcgatggttagctttttggcaaattttaagttgtttagggtctccgaatcatgtggttttaaaaccagtgccttttcataattatagatcgaaggagctactttgtttaatttatagtaactgttccctaaattaaaatacaattctgccgattgctgtttgtcttctttgagaatactttcataaacatcaaccgcttgctgatattgtcctttttgatacagcgcatttcctttttcaaagctgctttgagcaaagaaaatctgagtgattagtaaaaaaagatatactatatttttcatcttattgtcgttaaacccgacaggttttttaaaacttgtcgggtttgattttttaagtttaaacgatttgtttctctaagtccgaaatgatcagaacagctttgtcaaaatcctgttggattgatgtgctggatgccggagcatatctcgcaaattcacagttttcagtcagattaataaaactttgaaccgattccgggctggcatttcgggacaataacagttcgctaatattatctttgctcatttctgaagtttcgatatgcagtttcgcttttaggaaattgtgcatcgctttttccagagcaatataaaacggttctttgttgttaagttgttttttagcttcagatagatatttcttcgccagcttattgttcattttaatacggtttccggtaacgtcgccgtcaattgcttcttttcttttcttagccagaataatgattggcagaattacgaaaggcaggaacaatagcgtgtaatataaattagaaccgtaaaaatcatttttagcgatcgaaaccaaagtggttttaggtttgatgtacttgaactgttccgtttttgcaattgtatttgtagctgcatgtgcaggggtatttgctgccgatggcattgggccgtctaaaacgtcaatcatgatttcctgtgaagtgatcgttttgtaggaacctgtgctcaaatcaaaataagaaaactgcatgggtttgatggcatattttcctttgtattgcggaataatggtgtacttgtcgcttatttttccggacattcccgaaagtgaagtggttactttttcatcgtgaaccggatcatacatctctaaggcattaggaacgacaggttttggcaaagtaaacaatttcatgtttccgttcccggctgcgctcacaaacaggtcaagactttctccgctcttcaaggtcgttttagaaggggtaaccgtaaaattaaatttacccacagcaccgccaaagccttcaggtttggtagcttccggtaaaggtcgtacgttgattgttttggctccggccgaaactactttattgtcgtcgcttacaatcatctgaccgaacatatcacgacggttggtaggcaattgcacgcctatgtccagtgaaagtggttcaatggtaagtcttcctgatttttgtggatacaaaatggtctttttcaagactacataataacatctttgcccttgataacttccctgttcaacagcaagttgtttgatatcgatattctgattccagaagtcattgtatttaggtttagccaactctttgaaaccggtcacattgatatagttgaaatacagtttgtaaacaacagttataggttcattcagatacggatttgtttttgaaatttcggccacaaggtgtagcatttcatcacctgtacttgatccttgaggtctgtcattaggatctctttcctgtgcaacggcattggttaccacaatttttaaaggtgccgttttatagatctgaccattgtattcaatagcagcttgtttgattgttacagtccctttgtggtcgggctgtaagatataggaatagattttttgaaaagaacttcttccattaatccaggattgactgatttgctggcttggtccggctacaattttaaaaccatcaaaagaaggctggtcaaagttgtccccatcaacattcatgatgaagtcgatacgaagcctttcgtttactccaagcgtattcttgcttactctggcttcaaattgaacttgagccataagtccctgaaaagtgaatagtaatagaattaaatatcttttcattacttgtttaatctttttttatgttgaatcgtttaattggtaatttgtttaatcgtttttctacagttttgctgcttgtccgaattaacagttaaacgaataaacggttaacctaagaaatcctaccagtctttttctgtttttttctggttaccttttactttttgagcgttgactttgtcctgaattttcttttcttcgttgttcacggcatccagtaaattctgaactctttctttagatatccctccaggcattggttttggctcccctttgttgtctgatttgtcatctttcttagggtcatttttaccgtcttttttatccttgtctttatcgcctttgtcgtcttttttctgatcgtcttttccgtcctttttgtctttgttgtcgccgtcttttttctgatcgtcttttttgtcgttctttttatctttatccttgtccttgtttttgtcgtttttcggaggattttcttttagtttctgttttgccaaagcataattgtaacgggtctcatcatcggcagggtcgttacgcaaagcttctttgtaagcttcaacggcctgtgtgtaatttttctctttcataaaaacattccctaaattgtgaaatgctttgtgcttatcaggtctggctttagcattttttatcgctttagcgtaagcaaacttagcttcagaaacctgattctgtttgtatatagtgtttcccagattataaggagcagcagtacgttttgggaattttgattctgaaattctgtaattggcttctgcgtccgtaaatttattctgcttatattcttcattggcctcaggcaatgttttgtctttctcctgagcagaaactgctaaagaaaatgtgagtaaaatataaagaagtaaatttttcattctaatttttttatgttttgtttccggttttatgcgaaacaattatttcttttcgttaaataaattcaactctttaatccagtttgtttttctttccaaaaggaaaatgtctaaaaacaataacagaaaagcaaatccgatgaaccactgaaattgcgattgaaaatcggccatttgagttgcttcgaattctgttttctgaatgttatttaaggcattcttgatatattcgagcacttctttggtatttccgccgtaaacataaccacctttggtcgcttttgcaatattttttaaatcttcctgatttaattttgtggtaacggtttgcccgttttggtctttttgataacttctgactacgccgttttcttttaaaggaatggtacctcctttttcagttccaacaccaatggtaatgattttcattcccattttgttggcttcttctgcagcagctgtagcgccttcagagtggtcttctccatcggaaatcagaatcagtaatttactggttttgcttttttcgtcaaaataagtagaggaaagtctgatggcctcgtctaaagaagttccttgtgaagaaaccatgtcgggagtcatgctttgcaggaacattttggcaacactataatcggaagtaattggtaaaaccggaaaggcgcttccggcataggctacgattccgattcggtcacttcctaaattgttgatgatttgagaaaccagctgtttacttttttctaaacggcttggtgccacatcttcggcaagcatactttttgaaacgtcaacggcaaaaacaatatcgattccttcccgttttacggtttccattttagtcccaatcttcggatttaccaatccgataattaaacaggcaagtgccaaaagcaataccgataattttaggacaggtttaaaaacagagcgttccgggctcagtctttttaccatttcaagatcaccaaattcacgttgttttttctttttccaatacatattgaaaaggaaaatgcacgccacaattgggagtaagaataaaaggtataaatattttttttcgtctaattccattttttaattctagttctcagtcgcagtcgcagttttcagttttaaacggaaaactgtgactgcgactaaaatattatataaagcttctgtaaactgtatttcttaatcctacttccaatactaacaaaaaggcggcaagtaaaacaaatattcggtacttttcgtcgtaatcgtagaattttagttcctgtatttcggtagtttcgagtttattgatggcactgtatatttcggctaatcgatcgttactggttgctctgaagtaggttccgtctgttttgcgggcaatacttttcatcaattgctcgtcgatttctactttttgcattttaaacaggaaacctccgtttggtgcgtaggcgtatggcgacggagccattccgttggtaccaattccgatcgtgtatacttttattccgtattgttttgcaatgtctgaagctgtttcaggctcaataaaaccggcattgttcaccccatcagtcatcaaaataatcacacgactttttgccttactgtcttttagacggtttacggctgttgccaatcccattccaattcccgttccgtcttgcagcaccgtgtcgtatttaattcctttgatcgcttctagaataatagctttatcgcttgtaacgggagttttggtataagcttctgaggcatataaaaccaatccgattctgtcgttaggtctttccccaacaaaatctgcggccactctttttaaagcttccatacggtttggctttaaatctttggcaagcatactacccgaaacgtcaattgccattacaatatcaatccctttcgtggtcttggtctgattgctgatgtcaaccgttcttggtcttgccaatgcaatgattaaagagcttaaagcgataatcctgaaaacatacaaacaaggttttaatttggtcaatagcgattcgctgtttttgaaaccctgagttgaactcatttttaaagtcgccgattgctggttgcgtttccagaaaaaccaagcgatcgcaatggggattaacagaaacaaccaaaaaaattccggatttaaaaaagttatcttatccattagttactcgcttttctaagttctacagaatttaatattctggttgtaatatcattggcataggtatctccttcttcgtgtaaaatcaagatctgttgtaatccctgatcttgtttaaaaagtaagagttcataatatgcttttgcacttgtcttgtcaataggattgaaaacggtcatggttccgtatccttttagtccctgaacgccttcattggtttgaaaatcttcttgttttacaataatattttgtccgccctgagcttcaataacttttaaagaaccttctaatgctttggctaagtcaagctctacaggattcttaaacttgctggtagaaacggttacgtagaagtttccaaccatgcttccgtaagcgaaaagctgcatctctttgatgagggccatggtttctttcggaaggactttttgagtatccatacgttttaaaacctttggggtttcaatcaggatgcccggatttccgtactcactttttacccattctccttctaataattcttttgaaggatgtccgattacattatcttttacatagttaaaaccttttgtaacgataaagaaggcggtagtggcaatcagtaaaaataaaacagatcctactgagatcgcaatacgtttgttgcgtttctttaacaactgaagttttatctgtttttgtttttgtgcttcgttcaacaattgatcctcttcttctgccggtacttcggtgggaatagcattatcaagtgtcaggattactttctgaattttatttcggtcttctgtgatttcaaactctaagggtttagattttgcaaatttcactaaatccgcctgacgtaaaacacgttctaagttttcaacggtttccggtgttaaagtcatcttctttttggtagaagcagttctgatggcctgaatcaattcagaagtggtgctttccattgccggaatatgaattgcctcttcgatgtagtttcgggcaatatccgtcaattcactgtagtattcttttatttctcctttttgtaccagttctttctgctccagattgttcaacaaacttgtcgctttttctataggagttttgtagacttcctcttctatctttttcttttgatgtttcttaacataccaataaacaaacgctccgatggcaagaattacaatcagaatcaaaacgtaaatccaccagttaccaatcccattgtctgcgggagtaatgtctttgatgtcgtacattttttgctgtaacgtatctacttttacattggccacttcaacgcgaatagaatctgttgcatatggtttcttgtcaattaaaattttaatagacggaatggtatattttccggaatcaaattgggttaatccgtattttttaatcagttcgtaagtgtcatttttcttgacagtgtcgataggataggattgaataacctctaaaggaccaatgttttttagtttaggaaaaacaaccttagattttgaacttacaactgttttaagagtgagtttaaactcggcaccaattttattttttgtagtatcaatacttgtctcaacttgtttttgttgcgcaaaaacagctgaggaaagtaaaaataaaaatatgtaaaattttaatttcatttggtttttgatttcagattttggtctaaaatgaatgcttaaaaatggaacacggatgacacagatttaaacggatttttttatctaaagactttataattcgtatgatctaacagtctaacaatctaagaaaactaatattctaagaagtctaacaatctaagatcatcttgatttaaaatagcctagcaacttagttacgtaattttcgtcgactcttgtatttacgacaccagctcccgatttactaaaaatatccttgaaataattcactctgtcctgatagtgtttttcgtaattcagtcgtactgtttttgagccggtatttaccaattgaatttttcctgtttcggcatcgagcatacttaccattcctaaattcggaattttttcctcgcggatatcgtacacacgtaccccggtgatgtcatgttttttagaagcaatttttaaagtctgctcataattttcggccatgaaatcggaaatcataaaaacgatcgctttctttttttgtgttccggacaggaatttcaaagcttgcgaaatatcggttttgtgactctttggttcaaattcaattaactcgcgaatgattcggagtacatgagaacgtcctttttttgggggaatatacaactctacattgtcagagaataatattaaaccaattttatcattattttgtgtagccgaaaaagccatcgttgccgcaatttcggtgacgatgtcttttttaaactgactttttgatccaaaaccttcagagcctgagatgtctaccattaaaaccatggttagctcacgctcttcttcaaaaacttttacgtgagcttcgttgtagcgcgccgttacattccaatcgatgttacgaatatcatcgccatattggtattgacgtacttcactaaaagtcattcctcgtcctttaaaggaagagtggtattctcctgaaaagatatgattactcagtcttttggttttgatttctattttccgtactttttttaaaagctcttttgtatccattttatttgtttaaagtttaaagtttaaaagtttcaagttagtcttgcaacaacctgaaacctgaaacttgaaacaaatttttaaggtacctcaatctcgtttacgattttgttgataatgtctacagaagtaatgttttcggcttcagcctcataagtgatacccactctgtgacgcagaacatcatgtactactgcacgaacatcttcaggaattacataaccacgacgtttgatgaaagcgtaacattttgctgcgttagctaaattgatacttccacgtggtgatgctccaaagctgataagaggttttaagtcggcaagcttgtatttttccggataacgggtagcaaagatgatatctaagatgtatttttcgattttttcgtccatgtaaacttcacgaacagcttcttgcgcacgcaaaatttgctctacagaaacgacaggatttactttttcgtaacttccttttaagttttgacgaattacgaagcgctcttcgtcaatttttggataatcaattacagttttaagcataaaacgatcgacctgtgcttcaggaagctgataagttccttcctgctccaccgggttttgggtagcaagaactaaaaacggacgatctaatttgaaagtggtatcgccaatggtaacctgcttttcctgcatcgcctctaaaagtgccgattgtacttttgccggagcacggttaatctcatctgcaagaacaaaattagcgaagattggtccttttttaatggagaattcgttggctttgatgttgtaaatcattgttccaataacatcggcaggtaataagtcaggagtaaactggatacggctgaacgatccctgaacggcttgcgacaaagtattaatcgctaaagttttggctaatcccggaacaccttcaagcaaaatgtgcccttgtcctaaaagtccgattagtaaacgctcgaccatatgtttctggcccacaataactttgttcatttccattgtaagaaggtctataaaagcactttctctttcaattttctcatttatcgctctaatgtctaaagtcgttgtattttcttccatataaatatttttaaaaccttgatttttatgcctaacttttgagagtgcaaattgaatattttttgagaagtaagatgttaaaaaatggttaaaacttcgaccaaagacctaattttaaggacgaattgggaatctatttttatatttttaagaactttggtgattatgcttcagaaaagcatatttattaccaaaaataacgcaataaaaccatgagtaaaacagcattatcgcctattatttcgggcactatgaattggggtgtatgggataaaaacctaacgcttaaagaaatggaaaacatgatacagatttgtatcgaaaacaaaattactacttttgatcacgctgatatttacggagcttatactactgaagcggattttggaaaagcatttcaggccagtaaaatttcgcgtgaaaaattacaactaatcaccaaatgcggtattcagatgattgccgaaagccgtaaaaatacaatcaaacattacgactactcgaaagaatatattatatggtctgttgaagaatcgctaaagaaattaaagacagattatgtggacgtttttttactgcacagacctagtccgttgatgcaggccgatgaaattgcggaagccgttgaaaagttaaaatcagaagggaaaattattgatttcggactttcgaattttacaagttctcaaaccgaattgattcgtcagaaaacagaagtaagctataatcaggtgcaattttcagcaacgaatttcgagccgatggttgacggaagtttcgattatatgcagactcacgggattcgtccgttgtcatggaatccgcttggaacggtttttagagaagacactaaaaaaacacgtcgtttgaaaaagctgttttcggatttagtgaagaaatacggatttggttcggatactcttttattagcctggattttaaaacatcctgctcaggtaattccaattgcgggaacggttaatattgccagaattcagtcgttgatgaaagcagtagaattggaaatggataaggaagactggtttgcgatctggacagaaagtatgggcgatgatgttgcttaatttttttaagttttcagtcgcagttttgagtattcagggaaaatgctaaaaatattttgccacagattaacggattatagatgattgattaatctgtgaaaatcttttaatctgtggtaaaaaaataaaaatatacaatgaaaaaaacagttttaattactggggccacaagcggaattggaaaagcaactgcgcaaatactggccaaaaacaattttaaagtgatcctttgcggaagacgtacggatcgcttaaacgaacttgaaaaagaactttcggagtttacggaagtacattctttagcatttgatgttcgggataaaaaggatgttcttgaaaaaattgcttctcttcctgcatccttttcagatattgatattttgatcaataatgccggaaatgctcatggtttagacccgattcaaaccggtgatttagacgattgggatgctatgattgatatcaatgtcaaaggacttttgtacgtttcaaaagcggtgattccgaaaatgacagccaaaaaatcaggtcatattataaacattggttcaacagccgcaaaggaagtgtatccgaacggaaatgtgtattgcggaagtaaacatgccgttgatgcgattacggccggaatgcgaatcgacttaaatcctttcggaattagagttggaggaattcatcccgggatggtcgcaaccgaatttagtgaagtgcgttttaagggagatactgagagagcttcaaatgtatacaaaggtttcgatccgctacaagcagaagatatcgccgatattattcattttgtagtttcaagaccgtaccacgttaatattgccgatttagtggtcatgagtacggcacaagcctcgtcgacaattgttaagaaagattcttagacgtcttagactggcttagatttttagactagcttagacttcttagaatgttagattattggattcttagatttttagactggcttagacttcttagaatgttagattattggattcttagatttttagactggcttagacttcttagatttttttagatactaaatcagtaatcttaaaatagagtttacggacttcttaaaattttagattaatttagaggtctcagaagtctagcaatttcggcttcttagattgttggattattagatctttagactaagcaataatccaacaatctaaaactcaaataatccaagcaatctaaaaaaaaatgatcaacaagcgccttttaataaaaaacctgctcgctcataatgacgagagcagtttttatgataagaaaaggcaattgaatctgcattcgcgggaaggaaaggggaaattcctgaaacatatctgtgccttatccaattccaacccgaccaataattcttatatcgtggtgggggtggaagatcatgacaacgaaatcgttggggatgatttctttgatgacagccgaatccagaatctcgtgaacgcctttttagaaaatccgcctaaaattcaatacgagaatgtaccgttcccaaatcttccaaaagataaagtaatcggattggtaacgattaagcccaaaagtaaaatctcttattttaaaaaaggaattcataccattcttgctaatagtgtttttattcgacggggaagcaattctgttcctgttgaaggcgaggtcgaaaagaactatcaaaatacagaaacggtcatcgggatcgaaaacagctcaagaaacagcattcagtacacacttgacggggtaattgattttatgaatttcagacacaaagacatgtcgcctaagtaccatgtttttaaagaattatttgtgatctgctgggcaggagttcctaaaaaatccagagataaaacattcttgtcccgcgttgatattgagctgatcaatgaacagattaagcttttttattctgctcaggatgtggttacgattgtgtatgatgaagatagttttaccataacagaatatgttccgctgggtttaaatgacaagaccagttattatccgttggagaagcaaaccattcatttttttgacaacggctattataaaattgaaagtgaaatgctttttcagcccccggaattcaataggaaaatgttgtatcatatttacaattcaaatatctcgctactccaaaaacttcagaaagggatcgctttgtcagcgcgtgaattaaaagatctggaaaatctgccctctacttttatgatttgtcatctgaatggttttgaggatgccaaacaaaaattgattgatgccaaactgcttttaaaaccttttgggaatatttacttatcatttaaagaggcgcttcgagttttgcgtaagatgaaatacgatgttcaggaaggggctaaatagaggttctaagttgctaaggttctgagattctaaggttatttttgaaacgtgtaactattggtactttaaatacttgtggacttcatcgtacggaaataatagctctttagacccgtcggcataagaagcggcttcataggagttgtaatataagagcaatccttcttttgtataaaaaatgttctgtggcaggtgaaatttgtcattttcaaacattagaccagttgcattgatgtttgatttttcagggattttatattttttgcggaattccttttcggcataagccataaattctttttcgtttttaaagatctgatcggtaaaaattgtttttcccgtttgggaatgaaacaataaggagcgatatccctgatagccatgtgctcctccggtaaacgtatagtgatcaattttgatattgataatctcatcagattcaaattcgacattcccttttacggtcgcttcccatccgaaagtttctgttgggaattttttgtgcatttcttcataagaagctataaaagaggttgccaaagatttgtagtcgttagcttttttgggatcttcttcaaaatagacgatctcttttatcacagagaaaacttttttattaatactgtcggcaacaacaggaatattttttgcaataggaacgtcgatcgttattttcggacagtccttttcgcaagggattgtcgattctttttcaaatgactcattttcaaatgaaagttctttgctgcagcttacaaacgttaatagcaaaaagagtataaaaggataatgtttcatgtcaaaaagtgttaattatatacaaaggtaagaagttgtatcaggattaaaataaattaaacggtaaatttgtaccagaattaaggatttaaaatttataaccatatgaaattcaatactaaagtaatacatgggggtcagcatcatgatccggctacaggagcagttatgcctccggtgtatcaaacttcaacttttatacaaaccagtccgggtaaacctttggcagattatgagtatagtcgtgcttcaaatccaacgcgtacagctttagaaaatgctttggccagtattgaaaatggtactcgtggattggctttttcatcaggtttggctgctaccgattgtattctgagatcgtttaaggccggtgatgagattatcgcaatggatgacttgtatggaggaacctacagaatgttctccagaatatataaagattcaggaattaagtttcattttgttgatatgacagatatcgaaaaactgaaatcattaatcaatgaaaatacgaaattgatctgggtggagacgccaaccaatccgttgatgaaattagcagatattcaggaagtagccaaaattactaaagccaataatattttatttgctgttgataatacattcgcaactccttatttgcaaaagcctcttgatttgggtgctgatatcgtaatgcactctgcaacaaaatatttaggaggacactcagatgttattgcaggagctttaattgtgaaagatgaagctttaggagatcagttgcattttcagcaatttgcgaccggagcaacattagggccaatggacagcttcttggttttaagaggaatcaaaacactttcgttaagagtacagagacattgtgaaaacggagaaaaagtggttgaatatttaagcaaacaccctaagatcaatacggtttattatccgggcttagagagtcatccttttcatgaaattgccaagaagcaaatgaaagcttttggaggaatggtatcttttacttttaaatcagggaaaaaagaagactcaattgcctttttagagaagctgaaagtttttactttggcggagtctttaggtggagtagaatctttggccaatcatccggctttgatgacacatgcatcgatcccggcagacaaaagagccgaagtgggtattaccgatgacttagttcgattgagcgttggtattgaagatgccgaagacttaattgccgacttagagcaggctttagcataaaaaaatcaataaaaaaattccaaattccaatttgaattattttggaatttgggattttttatttgggatttttaaaattataagtattgaatatatcctatattaaaccaaatctgagcatcgtttgatttgttttctttgtgaattttcttattcggatttagaccgtctacccagtcggaattaaaagcctgaaaacgggtttcaaacatcaaatcgctcatttcatttaatttataatgaacacctattccggcagtaccagataaaacgataccgttttcacttgaaaagccaaattgacggccatctgaaggagtcagatatttaggaaatgtagctgcaggagttcccaactgaccaaggctggaacttacttctgttgtatagtaacttaccaaaaaacctaaacttacataagggctgaaagcccctatagaattttcataataatgtattttcattggagaaaattccagttgggatccgagacttattacagtcgattttccttgcatggctttgagttgtctaacccccagtgtttcgggttttttctctgtccactctccaaaattattcagttttgttctgttgaatgaaagttctgatctgactttaaagtgttcagaaaagaatcgttctctgttgctgttagtggaaaagttgacaaaatgaacaagtccaactccaacccctgtatttccaagagtcgtatccagattgtttctttcgccaaaatcagattggaaaagaacagggccgaatattattccaacctcgtgtgctagtgattgtgcagtcgatattgttgagatgcctagaaaggcaaaaaacgtgagtattataggtttaagcatgtggtatttggtatggggtttcagatcccggcaaatatataaaaagaggagcaactaagaagtataaagagctgtattgatgaatatttattaaaaatattaaaatattaaatatatcggtagtaatttactgtaaaacgcaaaacctaaaatatcttttttcttgatttactgtataatgaataaaagtttaagagaatcgtaaaaaaatattcaataaatgtcattttcgattacctttgtcataaataacgaaaacgttttcttaaatgttaataatctaataatcatgtcacaaagtattaccgcttttatggattcggttagtcaaaaaaacccgaatgaatcagagtttttacaagcagttttagaagttgccgaaacggtaattccttttattgaagaaaataaaaaataccagaacaaaatgcttttagagcgtatggtagaacctgaacgtgttatcttgttcagagtaaattggttaaacgacaaaggagaaatccaggttaataaaggatatcgtatccagatgaactccgcaatcggaccttacaagggtggtttgcgttttcatccttctgttaacttaagtattttgaagtttttggctttcgagcagactttcaaaaacagcttaaccacattgccaatgggtggtggtaaaggaggatctgattttgatccaaaaggaaaatcagataatgaaatcatgaaattctgtcaaagttttatgacggaactttcaaaacatatcggagctgatactgacgttcctgccggagatatcggagtaggtggtagagaagtaggatatatgtttggtcaatacaaaagattaagaaatgaattcaccggagttttaactgggaaaggaatttctttcggaggatcattaattcgtccggaggctacaggttacggagcagtttattttgctcaaagtatgttggcaactaaaggagatgactttaaaggaaaaacggttgcagtttcaggttctggaaacgtagcgcagtacgcaactgaaaaagcaactcaattaggagcaaaagtagttacattgtcagattctgcaggatatatttatgatgcagacggaatcgatgctgaaaaattagccttcgtaatggagttgaaaaatgagcttagaggaagaatcagcgagtatgtggcgaaatatccaaatgcaaaatatgtagaaggaaaacgtccatgggaagttaaatgtgacgtagcattaccatgtgcaactcaaaacgaattgaatggtgatgaagctaagcttttagttgctaacggttgtattgctgttgcggaaggagcaaatatgccatctacaccagaggcagttactgttttccttgaggctaaaattttattcgctcctggaaaagcttctaatgccggtggtgttgcaacttctggtcttgaaatgtcgcaaaactcattgcgtttaagctggtcttctgaagaagttgacgaaagattaaaaggaatcatgttagcaattcatgcttcatgtgtaaaatacggttcggataaatcaggttatgttgactacgtaaaaggagctaacattgcaggatttgttaaagttgccgatgctatgcttgctcagggtgtagtataattttttagttatagttttttagtgcctccatttgtcttttttaagataaatcggaggcattttttatttgcaggagaacaaaaatcaaatactttcgtttgtagtatatttgtctatctgaatttatcaaacaatgaaaagaaagtttttgtatgttttacttttgttggtagtacaattttgtttctctcagaataaattgtcctggcaggggtatttttcgtttaacgaaataaaagatatctcacaatcttcaacaactgtttttgtagcttcagagaatgctcttttctctaaaaatacagctatgaacacagttaaaatgactacaacggtcgatggactttccgggcagaccatttctgctttataccatagtgaaggatttaagaaaaccataattggatacgaaaacggactaatgattgtggtaaatgaaaccgatggcagtatactgaaagttattgatatcataaacaaacaattgccggccaacctgaaaagaattaaccattttatggagtataatggcgtgatttatgtttcctgcgatttcggaattgtacagtttaatttaactagcctcaaatttggagatacttattttattggagataatggggctgaagttcgagtaagacaaacggcttattttaatggattcttctacgcggcgacttcaagcggaattaaaaaagccaatagtaccaataccaatcttattgattttaatcaatggagtctggtaaacgcgggtgactggagtagtattgagccgatagattcggagctggtcgcgataagttcggcaggattcatacaccgatacaactccaattcatttgttggttttttacagctcccaaaaccttcagttgacatgcgggctgtaaatcataatctaataatcacaacgccggatgttgtttatgtgtataacaatcaaatggtattgatgcgtcaggttaccaatacgcaggtcttggataatatgctaaattttacctgttctagtgttattggagatcaaatatatataggaacaaaagaaaagggattgttctcatcgacactttcaggaacttccgcttttcaggagaatacaccatcagggccggttcgaaataatattttttctttagatgtaagtcctaacgcgctttgggcagtgtatggggattatgatactttttacaatccgtatgagctagacagttatggagtgagtaaatatagtacttcgggctggctaaatattccttactcaggggtttttggagcgaaatcaatgacaagggtaattacgaaccccaataatgaaaagcaggtttttgtaagttccttcttttccggtttgttgaaaatagaaaacgatatcccagtcttattgtacaatgaaaaaaatagcggattagaatcgatttcgtttgcagggcctaactatattgatgttcgtattaatggaactgttttcgataaaacggggaatttgtgggtcactaacagcagaattaagaacggtttaaaagttttgaaaaccgatggaaaatggcaaagttatgcgacaacttcaattcttaaagatgcagaaacaatcagttatgccggaattgttgtcgatagaaataataccaaatggatcgcaacgagtaatgatggagtaattgcttttaacgagagtaacaatacttttaaaaagatgacttttggagctgatgtgggaaatttgccggttgcggatgtgagggctgtggcacttgatgccaaaagtcagctttggattggtactacaaaagggttgagagtattgtcaaatgttgggggttttcaaacagagagccagctaaaggcaaatccaatcataatcatggaagataatctggctcaggagctgctttatgagcagtttatcacatcgatcgcagtagacggagcaaataataaatggattggtacaattgattccgggatttttatggtgtcaccaaacggtcaggaaacaaaatatcattttacaataaacaattcgcctttgccaagtaacgtaataaacgatgtcaaaatcaatagtgttaccggtgaggtttttattgcaaccaacaaaggaatgatttcgtttaaaggaattgcaacaggagcaaacgatgatttgaataatgtttacgtttatccaaatcccgtgcgtcctaattatgcagggaccgtaaaagttgccggacttattgataaagccaatattaaaattacagacatcgaaggtaatttagtgtacgaaactacttcgtcaggcggaacaatcgaatgggataccactgctttcggaaagtataaagtagcttcaggggtctatatggtttttatttcagccgaagatggaagtgaaactaaagtaaaaaaggtaattttaattagataattagatttttagattgttagattgttagattgttggattattagaaagaattagagtctaacatctaagcagtctaataatctgaaaatccaacaatctaagaagtctaacatctaagcagtctaataatccaacaatctaagaagtctaacatctaagcagtctaacatctaagcagtctaataatctgaaaatccaacaatctaagaagtccaacatctaagcagtccaataatctgaatatccaataatctaagaagtctaacatctaagcagtctaataatccaacaatctaacaatctaaaaatctaatcttgctagtcaaaaccaaagcaatagtaatctcatcgttaaaatttcaggagaaaagtctgatcgtaaagtgttttacactttcacacggactgaaatcctattttgtacgtgatgccttttcgagtcggaaagcaagtcagaaaattgcttattttcagccattgtccgttcttgagattgaggcggtacacaaaaacaaaggaaccttagaaacttttaaggagataaaaacagcagtaccttttcaaagtatccataccgatcttgtaaaaagtacgatggtgatgtttttgtctgaaatgctccattattccattcaggaagaagaaaaaaatgaagccttttttgtgtttttagagacagcattgggttggctggatcaccatgatgaaatttcgaattttcatttgattctgcttttggaagctacaaagtattttggtttttatcctgatatttcagaagttgaattttcttattttgaaatgattgacggcgtttttactttgtttcatggagcaaatactttgacagaacatgaaacaaatctttttaagaaattaattgatcttaaattcgaaaacgatcagaaggtttttcatgtagctgaaaggcaaattttactgaaaatcctcattgattactacagttttcatttggaaggattcaaaaaaccaaaatctttagaggttttaaaggagattttttcttaattttttaaaatcgacattcttttttacgagatctattagaaattttctgtccgggcgctttttttaaacatcttttatctatattcctcaaaattccttactttcgcacctcgtttaagaaaagtataaaatgagcacaaaatttactgaatacaaaggacttgacttgccaacagtagcgtcagaagtacttgatttttggaagaaagaaaatatatttgaaaagagtgtaagtacccgtgaaggtgctgagccttatgtgttttttgaaggtccgccttcagcaaacggattgcctggaattcaccacgtgatggctcgcgcaattaaagatattttctgtcgttacaaaactcaaaaaggttttcaggtaaaaagaaaagccggttgggatactcacggattgcctgtagaattgggtaccgaaaaagaacttggaattacaaaagaagatattggtaaaaccatttctatcgaagaatataacgaagcgtgtaaaaaaaccgtaatgcgttataccgatgtatggaatgatttgaccgaaaaaatggggtattgggtagatatggaagatccgtatgtaacctataaacctaaatatatggaatcggtttggtggcttttgaagcaaatctacgataaaggtttgttgtacaaaggatacaccattcagccttactcacctaaagccgggacaggattgtcttctcacgaagtgaatcagcccggagcatatcgtgatgttacggatactacaatcgtagcacaatttaaaacgttaccggaaacattaccttcatttttgaaaggttttggagatattcacatcctggcctggacgaccactccatggacattaccatcgaatactgctttgacagttggaccaaaaatcgattatgttttagtaaaaacgttcaatcagtatacttttgaaccgatcaatgtgattttggctaaaaatttagttggaaagcaattcggaaaaggattttttgccagcgaagacgatgctgattttgataaagtgaaaaacggcgataaacagcttccgtataaaattgtagcagaagcaaaaggaaccgatttggcagaaattcgctacgaacaattattaccatacgtgttgccttatcagaatcctgaaaatgcgttcagagtaatcacaggagattttgttaccacagaagatggaacaggagtagtgcatactgcgcctacttttggtgctgatgatgcgaaagtagcaaaagaagctaagccggaagtaccgccaatgttggttttagatgaaaatggtacagcagttcctttagtagatttgcaaggaaaattcacttctcatgtaggtgatttggcagggaaatatgtgaaaaacgaatattacgatgcaggtcaggcgccggagcgttctgtagatgttgaaattgctattcgattaaaagaagaaaataaagcctttaaggttgaaaaatacgtacatagttatccacacagttggagaactgatgagccgttattatattatccgctagactcatggtttattaaagtaaccgatgtcaaagatagaatgttcgacctgaacgaaactatcaattggaagcctaagtctactggtgaaggacgttttgggaactggctgaaaaatgccaacgactggaacttatctcgttctagatattgggggattccattgccaatttggagaactgaagacaaaaaagaagaagttcttattggttctgttgaagaattgtatcatgcgatcgaaaaatctatcgaagcaggttttcaaaaagaaaacccattcaaaggttttgaaatcggaaatatgtctgaatcaaattatgatttagttgacctgcataaaaatgtagtcgacggaattactttggtttcagcttcaggccagccaatgaaacgtgaaagcgatttaattgacgtttggtttgattcgggagcgatgccttatgcacaatggcattacccttttgagaataaagataaaatcgatgagaataaagatttccctgcgaatttcatcgcagaaggtgtcgatcagactcgtggatggttttatacactgcatgcaatcggaactttagtttttgataaaattgcgtacaaaaatgtcgtttcgaatggtttggttctggataaaaacggacaaaaaatgtcgaaacgtttaggaaatgcaacggatccttttgaaaccattaaggagtacggtcctgatgccacacgttggtacatgatctctaatgcaaatccatgggataacttaaagtttgatattgaaggaattgctgaggttcgccgtaaattcttcggaacgctgtataatacgtattcattcttctcgttatatgccaatattgatgggtttaaatatgcagaagctgaaattccgttaaacgaaagaccggaaatcgatcagtggatcatgtctgaattgcatagcttaataaaatttgttgacgaatgttatgaagattatgagcctacgaaagcagcaagggctatttctgacttcgttcaggaaaacctgagcaactggtacgttcgtttgtgtcgtcgtcgtttctggaaaggagaatacgtccatgataaaatcgcagcctatcaaacgctttacacttgtttattaacgataagtaaattaagtgctccgatcgctccttttttcatggataaattataccgcgatctaacaggttcgacgcaaacagagcaatttgccagtgttcacttggcagagttcccgaaatttgtcgaaaactttgttaataaaacgttagaaagcaaaatgcagaaggcgcaaactatatcgtctttggttttgtcactgcgtaaaaaggaaatgattaaagtacgtcaacctttgcaaaaggtaatgattccggtacttgacgagaatcagagggctgaaattgaagcgatttctgaacttgtaaaagcagaagttaacgttaaagaaattgtgcttttagacgatgattcaggtattttggtgaaacagattaaacctaattttaaagctcttgggccacgtttcggtaaggatatggggttgatttccaaagagatacagtctttttctgcggatcagatcaatcaattggacaagcagggagcattggatattgtaattgcaggaaataccgtaactttatcattagaagatgtcgaaataacatctcaggatatcgaaggctggctggttgcaaattcaaatggaattacggttgcacttgatattacaatttctgaagaattgaaaaacgaaggaatcgcgagagaattggtaaacagaattcaaaatattcgtaaagactcaggatttgaagttaccgataaaattaaagttcaaataaaaagaagtggccttttagaagaggcaattctaaaaaatgaagactatattaagtctgagacattgactgatgatttggtttttgttgacgctttagaaaacggcacagaaattgaatttgatgacattaaaacaatgatattaatttcaaaataatataagatgatagatgaaattacaagatactctgatgctgatttagcagagttcaaagaaataattcaaagcaaaatacaaaaagcacaagctgatctggatttaattaagagtgcttatatgaacgatttgaataacggaacagatgatacttctccaacttttaaagcatttgaagaaggaagcgaaacaatgtctaaagaagcaaactcacagttggcgatcagacaggaaaagtttatacgcgatctaaaaaacgcattattccgtgttgaaaataaaacctatggtatttgcaaagtaacaggtaaattaatcagcaaagaaaggcttaaaatcgttcctcatgctacaatgagtatcgaagctaaaaacttgcagagataattttcaattttaatacttcataaaatagacgctccttaattaggggcgttttttttgtttaatgttttaacggttttgtttaaggagtaacggagtgataaataaagaattgaattacaaaagggctaaatgtagtaaaataatgttgcttattttttgtaagaatttttcaaacgatagtttttggagactataaggagtaaaaaataattagaactgccagtttggaagacagttctaattaaaaagttggcttgagattaagccagatttttttccagttctaatttgtgttttcttaaaacagctcttgtcattcctaaatttgctttagtagagtcagcggcaagatagatcatgaattttttgttgggagaaatgtcgatgatgtgaatttgattcgaaagtgtaatcaaaatgtcttcgatttcctgatttaaatttaaagcttttacggcacttaattttgctttaacaacttctaggttgtatgctgctgcaagttcagggtcaaatgccggatctattgtcaggtttccaaagcttaatcctgattcgatttctgttacagctactgcaataaagccgtttacgttagttttcatttcattcaaaaaaacgtttaaaaagtcattactcatagttttcggggtttggtgttaatagaaatatgttattttaacagtgaatttttgcttaactcagcagcagtttcctcggtcgatcgtaataataaccccagattgcttccgtcttttgaaaatgtaataatgaaatttgtgccgcttattttgtttccgataataactccttcagtggtttttaaaaagagttgttttaaggagcctttttcaagatctaataataatttgtcgctcatcgatactatggcagagctcattgcggcaatactgtctgcatagtctaagtgaagtgatgtgattagttttccttttccattgataattaatgctgcggaagatttggtatgaagcagaaaatcgtttagagtagttgtgatttcattcatatttgtaggatttaagaaagttgttaaattcttttcgttttaataccgtataaagggtaaatatgatcttttaatctaaacaagtgttaatttttattaacaaatataaattaaattatgtatcattgtaataccaaatcatgaataattttatttatttaacattaaaatcttgtaaaatggctaaagtgttgaaatttaaagaggtaagctctgatgtagagcacagaatgaaagaatttgaaaggattcgtattcagtttaaaactcaggtcaagaaagctgaggctaagaacgcagcagcaggaaaagaagggaaagggctctttaagtcgatttcagaattcttcgctgatcctcccaaaaagtcagcgcagtccaatatgagaaaataaattctctatataggtgatgaattgatgtaatacctgctcgtttgtcctcaaaaaacaattaacgctccattgggagcgttttttttgattaaattgttatttttgccgcatcaaaatttaataaaatgtcattacgaaaagcgtatttgcttatattcttagttttaattgttgatcagctttcaaaaatctatgtaaaaacaaactttgtgctaggagatgaagtggaagtttttgactggtttagaattcattttattgaaaatgagggaatggcctggggaactaaaattcccggagaatatggtaaattgattttgactgttttcaggatttttgctgtattcggaattggatactggttagccgattcggttaagaagcgttattctaattatttaattgttgccattgctttgatttttgcaggagctgccggaaatataatcgattcagtattctacggggttatttttgatgccagtgatagtaatttagcaacgcttttctcgccggaaccttatggaacatggtttcatggtttggttgtagacatgttttactttccgatctggagaggtactttgcctgcctggtttcctttatggggtggtgaagaggtttctttttttaatgcaatctttaatgttgccgatgtggccatttctacaggagtaggtatattactggtttttaataaaagagcatttcctaaaacagcataatttttatagaaaatttaaaatattcaaattccaaattccaatggcagtacatcctgttggaatttggaattttacattattgggatttagagcctgtttaaaattaatgtgttatttttaccttacgaaaaaccaaacttatgcaaagtccgtctttctctatctatgatgcatctgcaggctccggaaagacctatactttggtaaaagagtatcttaaaattattctttcttcaccaaggaacgatgcttatcgcaacattctggccattacattcaccaacaaagcagttcatgaaatgaaaagccgtattgttgggagtttgtctgagtttgcaaaagaagagccttctgtaaaagcagttgatttgatggaggatttgtctcgggatacaggactttcgattattaagattaagacaaaatctcaaaatattatcaagcacttaattcataattatgctgcttttgatatttctaccattgataaatttacacataaagtaattcgcgcttttgcacatgatcttaatctgccaatgacttttgaagtcactttggatacagagaatttattagttgaggcggttgatgctataattgcacaagccggtcaggacgaaacattgactaagctgttggttgattttacgatggaaaaaaccgacgatgataaaagttgggatgtttcccgggaaatcttagaaacgggtaggctcgttctgaatgaaaacaatcggaatgaaatttctcattttcaggataaatctattgaagagtttattgagatcaagaaaaaaatgctcgctttgtgtaaagaactcgaatctgaaaatgaaaattttgcgattgaggcattagctttaatcgataaaaacggaatcgatttgaagtcattctctcgcggtacttttccaaaccatttagaaagtattcgcgacgggaaatttaatccccgaaataaaacttttcacgaatttgatgatatagcaatcaataaaaccgcaaaagaccgtgcgttaattgaaaatgtaatccctgaactgcttcatattctggtgaaaatctataagaatttcgaaaaaagagatttctataaagcctttctgaaaaatattacgccattgtcgctgttgaatacggttagtaatgaattggctaaaattcaatcagagcaaaatgtactgtctatttctgaattcaacgccattattcaccgtgaaattcagaatcagcctgcaccgtttatttatgagcgtttgggagagaaataccgccatttttttatcgatgaatttcaggatacctccgagatgcagtggcagaatctgattccgctgattcataattccctttccggagaagatgattttggaaacaaagggacgctgatgatagtgggagatccgaaacaatctatttaccgatggagagggggaaaagcagaacagtttatagaattaggaaaagaagaaaatgctttttttaaccataaaaaagaggttaagcatttagatacaaattaccgcagttatagtgaggtaattgaattcaataacgatttttttaaattaatttcggcagagtttaccaatgaagattacaaagatttgtatgaaaatcatagttttcagaacataaattcaaagaagggaggctatgttaatattgcttttcttcctctaatcgagaagtcagattatgcagacgaagaagaagtggtcgagaaatcggatctgtatgttttggcgactttaaataccattcaaaaagtggttcgggaaggttttgaatacaaggatattgtaatcttaacccgaaaaagagatcagggaattgctattgcgaactatttaacggagcagaatattccgcttttatcatctgaaaccctaatgattcaaaatgcaacagaggtgcgtttgattgtttacttgctgaaatatttaaacaacagtgctgatctggagtcgaaagcaaattttcttcattttttgggatccaataaagaagttcagctgccaattcatgactttattgctttagggatgtctcaaaaaaaggaaggtgattttgaaaaatggcttttaacttttgatgtctcactttctttcgaagatgttcgtaaaaaatccttgtatgaggcggttgaaattataattgcaaaatttattcttcctaatgaaggaaatgcctatgttcagttctttttggatattgttttagagcgggacatgagaaatcaggctggtatagctgattttttaacttattgggataaaaatgcggagaaatttagcattccgtctcctgaaggaaacaatgctgttcggatcatgacgattcataaatcaaaaggattggaatttccggttgtcattatgccttttgcggaagaagactacaatcgaaagccaaaggataaattatggctcgacaccgaagatgtaaatttagatgttccaaaagctttgatcgataatagtagtgcggttgaaggtttcggtgagagtgcttcggcagtttttaacttgaagaaacaggaagaactgctggataatataaatgttttgtatgttgctttaacacgtgctgaagagcaattgtatgtgatatcgcaagggatgaaagaaaggaaagatggtgaattgcctaataatatggcttctttttttattcggtatttaatgcataaaggggtttatgatgctgaacgatcagagtatgagtttggcaataagagtaggctttcgaatgctgtaaaatcagttgatttggtgaagacgattcctgttgtttcggaagttttaaatccgaaaaacatcaagattgcacaacgagaggctttaatgtggggaacgcatcagcaggaggcaatcgcttatggtaatatagttcacgaaattctggcttttgttaaagatcggtcggatgtggatctggcaattacaaaaggaattgaaaatggacttattacaaacgatcaggtcgatatggtttcaaagacacttcaggaaattgtgaatcatccggagctgagtatttgtttcgatggaaatgcaactattttgaacgaacagacaattgttcagaaagaaggcaggattttaaaacccgatcgtattgttcttacttcaaataaagaagcttatttgttggattataaaacaggagtgatcaattcaaaatatacaagacaaattcaggagtatgaggaggctatagaggatttaggttataaagtgttaaaaaaagcgttggtatacatcggatcagaaatcgatgtagtaaatttgtgaaaaaattaatcagatgttaaaggtttgactaggtgtttttgtcttaagttgttaatttttaacgttttaaataaatagaaatgtacggtaaaataaaagaacatttgcaaaatgagttgcaaacaattgaagaaaacggaattttcaaaaaagaacgcattataacttcagcacaagatgctgagataacgatttccacaggagaaaaagttttaaatttttgtgccaacaattatttaggactttcatcacatcctgaagtggtacaagcggcaaaagacgcaatggattcacatggttttgggatgtcatcagtacgttttatttgcggaacacaggatattcataaaactttagagaagaagattgcagatttttatgggacagaagatactattctttatgccgcggcttttgatgccaatggtggtgttttcgaacctttgttaggagaaaatgatgctattatttcagacagtctgaatcatgcgtctattattgacggagttcgtttgtgtaaagcagcgcgttaccgttatgagaacagtaatatggaagatttggagcagcaattaattaaagcaaatgaagctggtgcgcgtttcaaattaattgttactgatggagttttctcaatggacggccttgtagcaccccttgataaaatttgtgacctggcagataagtacgatgctatggtgatggtagacgagtgccatgctgcaggatttatcggagcaaccggaaaaggaactctcgaagcaaaaggagttatgggaagagttgatattattaccggaacccttggtaaagctttaggtggggcaatgggaggttatactactgccaaaaaagaaattattgagttattgcgtcagcgttcaagaccgtatttattctcaaactcactagcaccggctattgttggggcttctattaaggtatttgaattgttagaaaaggatactactttaagagataaattagaatggaataccaattactttaaagcaggaatgaaaaaagccggttttgatatcattgatggagattcggctatcgttccggtcatgttatatgatgcgaaattgtcgcagactatggcaaatgaattattgaaacaaggcatttatgtaatcggattcttcttccctgtagtacctaaagaaaaagcgaggattagagtgcaattatcggccgcgcatacaaaagagcacttagacagggctatagacgcttttacagttgtcggacaaatgttaaaagttatataattcccactttggtcgaatttttgtaggttttttttaacatttcattttgtatttaaaaattttggtgttacttttgcttgtaattaactaaattgtaattaaaaaaaattaagtatgaaacatcttaacaaacttttagttgctgtgatgatggtgatgggtttaagttctcacgcacaagacagcaacaatccatgggctatctcttttggagttaatgccgttgatactagaacaagttctgggtcaggaagtggtttcttcgatcaacatttttctcagccattcgctgtaaaagacaactggaatattcttccttctctatcttacattggtgtaaatagatatgtaggtagcggtttctctgttggtttacaaggatctgtgaacaagattgataagtatgttactttcagtccatctgctgtagggcatgatagtagaggtaacgtagtaactaatcctggtgacttgatgtattacggaattgatgctactattaaatatagcttccaggaattaatcaaatctaaagtaatcgatccttcgttatctgttggtggaggttatactttcttcggagatagcagctacggaactgttaacccaggtgctggtgttactttctggtttactgatgctattggtcttgagcttgctacaagatacaaatggtcagttagtggtgatagaacagacaaagctggtgttccagatgctccatctcactttcaacacactgcaggtctagttttcaaattcggaggtaaagatactgacggagacggaatctacgataaagatgatgcttgtccagatgttgctggtttaaaacaattcaacggatgtcctgatactgatggagacggaatcgttgacgcttctgacgcttgtccagatgtatttggtttagctgcattaaacggatgtcctgatactgacggagacggaattgctgacaaagatgacgcttgtccagatgttgctggtttagctgctttaaaaggttgtcctgatactgacggtgatggtatcgctgacaaagatgacaaatgtcctacagttgctggtcctagagaaaatggtggttgtcctttcttagacgctgacaaagacggtgtagctgataaagatgacgattgtcctacagtttacggtcctgcttctaacagaggttgtcctgaagtaactactgaagctttagaagatcttaaagttcaagctagagcggtttactttaactcaggaaaagctactttcaaaactggtgacaaagaaactccagctagattagatgcaattaaagaaatccttaaaaactatccaaacgcgaaattctctatcgaaggacacacagatagtacaggttctgcaaaaatcaacgacaaactttctcaagaaagagctgacgctgtgaaaaatgcattaatcgaaagaggtgtaaatgctgagaacttagagtctaaaggattcggatcttctcaaccagttgcaagcaacaaaactgctgcaggtaaagcacaaaacagaagaacagaaattaaacacattggttctaaataccaaggtaaaatctaatttactgtctaaataaatactaaaagccattcttaattgaatggctttttttatttttatcaaatgataaatacttcttttctcgggaaaatagcgaccgttataattcaggaatattcagataaacttgctgaaacaactattattctgcctaataaaagagcaaaagtttttttaatcgaggccctgaaaaatgagacgaagaaaacaatactttcgcctgaaattattagtattgaagattttgtgcaggacgtagcctcgatccgatcagttgattcaattgagcttttgtttgaattctatgatgtgtatctttccgtaacagagaaacaacatcaacagtcttttgaattatttgccaattgggcaaaaacacttctgcaggattttaatgaaatcgatcgctatctgttagatccttcgcatgtcttgtcgtatttaagtgatattgaagacatcaaaaaatgggggattgaagtcgagaacaaaaccaaacttttagagaattatattgatttttggaaacttcttccgttgtattatgattcgctatacaatcacttactgaataaatcaattggataccagggattgatttatcgggaagccgtaaacaatctcaatcacttttcgaataccgtttcaaatcgtagtttcatttttgcaggatttaatgctttgaacgcagctgaagaaaaaattgttcagcatcttttggccttagatcaggctaggatttattgggatgttgatcagactttcttaaatgatccttatcatgatgcgggactttttgtgagacgttttaaagaaaattggaaacattataaggctcatccgtttgaatggattgtagatgatttttcacagtctaaaaacattcagatcattgggacgcctaaaacaattggtcaggcaaaactagcgggtagtattatcgagaatatgatcacagaaaacccaactactgctttagataaagtggctattgtgctgggtgaggagaatctactgatgccggttttatattccctgccttcttcggttggaagtttgaatattacaatgggttattcgggaaagaacaacccatcgcagatattaatcgcgaaattgtttagaatgcataccaatgcgctttcgcgtaaaggagaaagttatgtcttttattataaagatatacttgatattcttacacatccattggttgaaccttatgccaatgccaataacttggttcggattatcaaggagaataattacacttttattacgcataatcgggttttagaactcaatttgagtccaacgccattgtttgatctgctttttcaaaagtgggagaatggatcgattgctgttcttgaaaatgtttcggctcttttacttttgataaaaggaaatttcagcaatgataatgaggaggaaaaaattgccaaagcttttgtttatgctgtctttaaagtaattaataagctaattaattattacacaaaacacaatcacattgataatatagatactttgcatgcgatctataaacagattattgatgtggctgaagtttcgtttgaaggagagcctttacgtggactgcaaattatgggggttctggaaagtcgtgtacttgattttgatactgtaattgtgacatcgatgaatgaaggaaagttcccggctggaaaatctcagaattcatttattccctatgatgtcaaaaacgaactgggattgcctacctttaaagagaaggatgccatttatacctatcacttttaccatttactgcaaagagcccaaaatatctatttgatttataatactgaaaatgatggattggatgccggagaacgtagtcgttttatcacacaattggaggtagagaaacaaaagaaacacaacttaacgtttgatatctataatcctgttttgcccacaacggcttatcagcctatggtggttcctaaatccgatgctgtgatggatcgtttaaaagaaattgcacttgccggtttttctccttcggctttgacgagttacatccgaaatccgatagatttttattttcaaaaaatacttcgaattagggaagtggaagaggttgaggagaatatcgcgctgaatactcttggaactatcattcacgaaacgttaaagacactttatgagccctttataggtaagttcatctcggaaacagatctcgaaaattgtttcaaattattggatgctgaagttttaaatcagtttaaattggtttataaagaaggtgagataaaaaaaggacgtaatcttttggcctttgaagtagcgaagcgaaatgtctctaattttttgaaaatggaattagaatctcttaaaaatggagatgcggttcagatcatagctttggaggaaacttttgaacgtgaattaaatcatacggatttgccgtttcctgttttaattagaggtaatgtggatcgtattgaattacgcaacgggaaaatccgaattattgattataagacaggaaaagttgaaaagacaaatgttatcctgaaatcatggaacggattgactcaggagcttaaaaatgataaaattattcaggttttggcttatgcctttatgtttgaaaccaaagcgaaagaaatccccatcgaagcgggtataatttcttttaaaaatcttaaatcaggttttttgcctttcacattcaaagaggataaagagagtactactacagtttcaaaagaaattttgagtaagtatttagaggaaatcgtattactgttaaaagagatttttgaccgggcaattccttttgaagagaaaatggattaatcgtttttattcagaatatcaactttgatgttttcctgatgaaaaagtgatttcatttctgaaattatatttaaaatggactttttttaaatgaattttatgaagtaaaatgttataatttttaaggagtgtatttctttttgatgaatttgtctacaaatttcacccaataaaccatcaaagtataaactataaataaaagtgattcaagggcttaggattagtgcataaaaggaataactttgccgaaatttttaaaaagaaatttttaaaaaaagtataaatttttgcccccaacaaaaagaagaaaaggctgtttcgataatttttcgaaacggtctttttttatgttgaaggccgtgatctaagagaaaaattgagacaaaacggtttttaattcctctttgttttcgatatgactcatatgtccgtcttcgaaagaaatgagttctgctgtagtatcatctatctgagtacgggaatcttcgtaatccagaacaggatctttttttcctaaaattaataaaacgggaaaaaggttttgttgcaaaagtgtttccctgtcttttctgactttcattccttcaagtgaagcaataattccctgtaaaggtgtttggagtgcctgcgtttttactttttcgatttcgtcggttaatcggattcggttgttctcactgaacaaattaccaatagccagactcacaaaggttgcgtaattctgtttgactgctttgatagctcgtgttcggttaagttttctctctgggctatcctcctttgaagtagagttgagtaaaaccagtttctgaatgttttttggaaacaattcggcgaaagccaaaccaacataacctcccattgaatgccctacaacagtagctttttcaatctttaaatgattcagcacttcctgaacggcattggcattgtcttccatcgtatgcacatatcccaaagaatccgattcgccgtgtcctaataagtcgattataatgacacgatatttttcagagaaaaaatcaacatagtctttccacatttttttgttttccagaaagccgtgaaggaatacaattgcatttccagttcccgaatctgagtatgatattttggtatttttgtataaaagcgttttcaaaatgaactttttttgttgtcaggcacaaagttaagaaagctgaagtaaaatatcgagatgtcttgatttaattgggaaatctttaaaactggaataaatttatttatagcaaaatatggtttgtgaacgaattaaaaatggcttccatttctgaaagccattacaaattaaaatcggttatcaccatctaaaagatttcctaatccgcctagcaggcttccttcgtcacggctgtttccgccagattttggtgccgatgcaataatgcggtcagccagtctcgagaaaggcaacgattgtatataaactgttccgggaccttttaaagtggcataaaataatccttcgccaccaaaaatagaattcttaattccgccaataaattcaatatcataagctacatctttagtaaaaccaatgatgcatcccgtatctacttttaggacttcgcctggtcccaatacttttttagccattgttccgcccgaatgtacaaatgccattccatctccttcgattttctgcataataaagccttcaccgccaaataaaccacgtccaagtttctgagaaaattctattccgacagaaacacctttagcagcacataaaaacgagcttttttggcagataaatttgccttgaaattctgttaaatcaattggaaggatttttccaggatagggcgacgcaaatgaaactttgcttttgctattgccttggtttaaaaatgctgtcataaataaactttcgccggtaagaactctttttcctgcgcttaaaagtttgtcaaacaaacctgatccttgttgttgagaaccgtctccaaatatcgtttccatctggatgttgttttccatcatcatgaaactgccagcttcggcaattacaatttcctgcgggtccagttctatttcaacatattgcatttcttccccaaaaatctgataatctatttcgtgtgcttgcataatttcttaatttatttgtttttaaaattagactaataatgctgtagaatgttacattctttagtcagttaccgctgtttttaagagcattaaatgattttgttattttaaattagtcttaattatgttttttattgctttaaattctatatttttgcaacgttattatattttatcagaatggcgttagttagtgatttgaccaccaaagtattatttgaaaccgaaaaaggatatagttatcaatgtgatttgactaatagtataatcatcaattttgttgatacagtgtcaagttacaaaattcatgattttttgatttttcaaagaaaggtcaatagcgttgacattcttaatatgctttatgacttatctgatcggtcagacgcacaattgattgaaaccaccaaaagaaatttttccagaaatcttactatctgtgaaatagtgcagttaagagatttattaaacggaactaaatttaccctcactttacattctatgctttgtaatattgtaaacgtagagcttatttagattcttacttagatcaaatccaaattttcgagcagttagaggtgccttctttaatttttgtaattttacacatataaaaattagaggatatgaaagatttattaagaacacgtacttcattagttgaaagtgtagaaaatatattaaacttacaagcaaaattagaaagtgacgcttctaacaaatatttagctatggcagcatggttagatagaaatggttatgctaatacagcatcttatttgtacaaacaagccgaggaagagagagagcatttcctaaaagttttcaaatatattacagatatgggagggattgccgttacgccgtctgttccggaagtgcagcaggaatttgcttctttgagagaagtatttgaaattgctttgcagaatgaaattgcagttacacaagcagtgaataaagtaattgcaaaatgtagagctgaaaatgactatgctacagaagattttatgatgtggtatgttgctgagcagagagaagaagagaaaaacgcaagaagagctttagagctttttgagttgattgatgaaagcgaagctgccggaaaattccagttggatgtgcaaatcgcaaaaatcggagagtaattgatatataaaattgaaaaagcccttaatatttttattaagggcttttttcttatctattcattcatcaaactctcgatctcgtcagcttcaataggaatgttacgcatcaggttaaaaggctctcctttttcctgaatcactacgttgtcttctaaacgaattccgaatccttctgccggaatgtagattcccggttcaacggtaaaaaccatattggctttcattggttcgtgaagtaatccgtaatcgtgcgtgtccagacccatgtggtgagacgttccgtgcataaaatattttttgtaggcgggccattccggattttcgttctgaacatcggctttgtcgatcaaacctaaacctaataattcagaggtcatcactttccctacttctacatggtattgtttccaaagtgttcccggagtcaacatttttgtagcttcgttttttactcttaaaacagcattgtaaactgctttttgtctttcgttataccttcccgaaactggaattgtacgggataaatcgcttgagtagttggcgtattcggcagcaacatccagtaaaattaaatccccttctttacattgttggttgttttcgatataatgtaaaacattcgcattatttcccgaagcaataattggagtataagcaaaacctttagagcggttacgaataaattcgtgaatcaattccgcttcaatttcgtattcggtaacatttggttttacaaatgataataatctacggaaacctttttcggtaatatcacaagcctgctgaatcaaatcaagttcttcgctttcttttacagaacgaagacgttgtaaaatcgggttgcttttggctacattgtgtgccggataatgttctttccaccattttacgaatcgggcttcacgggtttctgtctccactgtagcgcggtaatgttcgttggtgttgatgtacatcgtatcggcatacgtcatcatttcgttcaaaatcttatgaaaatcctgtaaccaatacactgttctgattcctgaaacctgaaaagcacgttctttagtcagtttttcaccttcccaaatggcgatatgttcgctggtttcttttaggaaaagaatttctttttgatgctcataaggtgcatccggaaacaaaagcaaaatactttcttcctgatctacaccactcagataaaaaatatctcggtgttgtgcaaacggcaaagtactgtcggcactaaccgggtaaatgtcattagaattaaaaacggcaactgaattaggtttcatttctgccgtgaattttttgcggttttttacaaaaagagcgctgtttatttggtgatatttcatgataattcggtttttgaacttcgaatttcaaaattacgttttttcagcaaacagcatgaaattgatttcttaaagttttattatttgttttgtgttttcctgagcgaagtcaaaggatcaccgcgaagggcgttaaggtttacgcaaagcacgctagttttttctcgcaaagtcgcaaagtaaccacaatcttgtcattctgaggaacgaagaatcacactagtaactcgacaaagattggcggttttgtttcacgcagatttcgcagattctgcagattttttcttttttacagttggtcttaaccacaatcttgtcttcctgagcgaagtcgaaggatcaccgcaaagtaaccacaatcttgtcattctgaggaacgaagaatcacactagtaactcgacaaagattggcggttttgtttcacgcagatttcgcagattctgcagattttttcttttttacagttggtcttaaccacaatcttgtcattctgaggaacgaagaatcacactagtaactcgacaaagattggcggttttgtttcacgcagatttcgcagattctgcagattttttctttttaccgtaagtattaaccactaatcttgtcatctcgacgcaggagactcgagcgagagcgaacagacgaagtaaatcacattagaaaatctacacagtaattcgccaatctttgtcgaatcccgactgtgatctacttcgtcgaaaggacaatattgcgtaatattgtataatctatgtacaagtaacagcccaataaaacataaaatgcatcactcaggtttcaaattaataacaatcaaagaagtcaaatcgcaatatccatttttaatcgatcgggaaggtttcgattattttgaggaatgggaagaggaggatttctttttgattgcattcgaaagtgtaaattttgaggccaatttttatttcgatctttatgagaataaagagaaaaaatggcttgccggagtattaaatcttcccttaaaagaaatggaagatcttagaattgaaggagtcctaataaatggaaatctttctgtaaacggaacgattataaatgccgaaggcgattacggaccttatgtttttattaaaggaaatgtgagttgtcaaagcatgttgttgggaggttcgtatgtcgaaattgaaggcaacgttactgcgaaagaagtagtaatgacttcctataatcacggtaattttaaatgttcgggctgtattgaagctccggtttttatagtcgaagatcattataccacattctcaagccgtaataacaatttgttctactataatgataaaacagacgacatggatcctgaaaatgaatcggaatatgatgaggacagtgacgaagaagttatttcagccgaattgcgaaaacaccttaataattctctaataaccacttttgaagaactcaaaagagagttggaggagggtgagttagttttaaaagaaagtaatccgttgccaaaaaatcaggaatactggcaaaagagagttttgtccaattacagagatttaaaaatagttccgctcgagtttaaaacagcagcattgtgcgagatggcattaaatatcacccatcatgcgttaccgtttgtggaggaagattttattacgtctgaaatttgcgagaaattagtcggtaaggatggttttgcacttcaggtaattctcgatcaatttataaccgaagaactttgttggaaagcggctgagagcggaacattggtttcactgattccggggcgtttttattcggaagagttaattataacgacttttaaaaaaggcaaacacgaaccgaatattaatgatgttcctgctgaatttatcactgatagtttacttgaagcatatgtgaaaattggtaaaggattgtggctcgacaagatttgcaaagaaaacggaaaggataaattatctattttaaaaagtgtaattgattccggaatacagcatcttgacgctatttttgggaatcactttagtgtcgaagttgttgattatgcggcatctctttataataatgaagaaaataaatcgaaatgggataactatgttcaaaaatataaagttaaattcgggcgtcttggattaaactaatttctttaatcaggctttaaatataaaataaaacagattatgattgatagagagagaataattaagaattacgttgaaggttacaatcaattcgatattgataaaatgacagctgactttagtcgggatattgtttttgaaaacattcagaacggtgaagtaaatatgactttaaacggactaaatgaatttaaagaacaagccgaaaatgcaaaagcctacttttccaccagatcacaagtaattactgtattgaatcattttgagtctaaaacagagattgaaattgattaccatgctgttttggcgatggattttcctaacggaatgaaagcgggagaagaattaaacttgaaggggaaatctgtttttgaatttttagataataagattttaaaattgagtgatattagctaattataaaactggagaaaagaattcaagagattagatttatattatggacaatgaaaagctaagaacactaagaaataaaatttcaattccattaagccaggctattagacttcttaaaaaaaataatgatgacattgaattgtgtgagcaggaatttcataatgataatatcaagacaatcagcataaaaacagagtgtgattatgatgttgcaaaagagaattatgagttatgtaattacgatgttgtaaaaacagtcgaaagaattaatcaaaaaacaattatcataacaacaggaaaagcaacagattctaaaataggctttgttttatggcccgaaaatggaaaaggtgaattctataaaactgttaagcgaaatgatgcttttattccaacagaagattttgatctttttttgaaagagtttcaatctgtttttcccttgcgaaatccgtggaatgatgtaattgaagatgaatttgataaaacgggtcataatttttttgaccataaaacgatcagcttgattgttgaaaaaataaaacttatagaaaatgaaaatgaaaaggagaatgcttttttattggaaacaataaattggttaaacgataaattagtttatgctgagtatattgtggtttatggtaatttatagaagactatggaatcaaatattaaaatcagaaaagttgaaaaacaggatttagattttgtttaccaagcgataaaagagcttgaaaatgaaattttagattttgaagtgtttagccagatatttgatgaaaacatttcaaataaaaagaatctctatctaattgccgaaaacgaaacagaagggttaggttttattagttttcatacccaaaatcttttgcatcattgcggattggtaggtgaaatccaggagttctttattcaccagaaacatcgcgggcaaggggttggcaggttattaataaatgaggttttaaattttgcagaacagcataatttaaaaagtattgaagtgaccaccaataaaagacgtgtagagaatgttgccatttacgagaatcttgggtttgctttaagtcataataagtttacgatttataagtaaactttgcagcgatgggaagattcaacataaaaaaaactgctgttttgtaggcagcagttttaataaatgggtaattatgttgtcattaatgtgagtattccatacagatactgcctactgccgttttgtataaaatccaaccacatctgttttgtccgatagaaggatagatttcttcgccgttacacatcggatatggtacacattctatagtactggtaccaccggcattaattgattttaattcttcttttgttaatttttcgaaatttttcataaatggttttttgttttttgattttcctactctataagtttttcggataccactttgataaaaatataaattatttttaaataaatacttacaaaataaagtttttgattcggagtgatttttacttgatggaagttgggtaaaagtttaatattgtaaattaataatttgcctaaagaaaaaatgcagcaattaaatacgtccataaaacatcatttgatagttggtgcactaattagtgtttggctatttgtttttgctttcatcattagaccatttgacgacggaacgatcaattttaagtcatggcttttaattagtttaggctttagtgttttggcatttttatgttattcaattgtcggatttattcaaaagagtatttacaagaagatatccaaatggaatgttagtttagaaatcgcaagtatagttttcttttatttgatttatctttttggaacttacacctattataaaagccctattttaaacggaggatatgattttacagcatttttctcgattatttttatcaaagtcaccctgattttaactcctgtaattgttttggcaagacgttatttgcttaaactgattccgataaaagaggattttttgattgttaaaggagaaaacaaattagatgttttaaaaattaaaaaagcagatttggtttgtgtttcgaatgcacaaaattatgtcgagatcttttatttggaaaacaatcagcttcggacaaaattgattcggtcttcactcaaaaaagtacaggaagattttgattttttgcttcaaattcatcgttcgcatttaataaatccattgcattttaaatcctggaggaattcaaatacgatccttcttactcaaatagaacttccggtatccaaaaattataaagcaagtcttttgactttgtaatttcgtacctaaaacagtacgttttgtaccaaagccaataaaaatggggtttgagcggattttaaaaaatagttttgcttcatcaattttaaaaataaattatgaaaacaaaacacatttgcctgcttggattgctattttttttgatcagttatctcttcttttctaagattctgccaaactttcaaaaaccaatcgattttgcgcattggtttaatttagttggagcctgtttgttgttgtcatttaatgatgtgtttccgaaatgcaagctaaatttgattgcatcagtattaaccacttttggtgttattgcccacattggcctttgcacgattgattttatgatgtggagtttcgggaataacgatctcgccagagaggcattgagcaagcagattagtgatacaccatctattctttatccttttgtgattgttgggccctctttgctttttgttggtttggcgattcatgcatttacttttataaaaacggaaaccgtaaaatctttgatggtaattgttggttcggctgctgtgggattttcattttttgctttgaaaaatggcgttttgatgcttttgagttgtttggtttttgttttaggattaggtttgcttctttatagaaaagaaaatccagaaacaaatggagtataaggcaattgggaaagagttttcaggtagattagaacttctgttttaattcatatcttcgctttcatcttgtgtgaaaatgaggatagaaaaagcaaatacaaccgatagcgaaattctaacacaaataaccaaaaagtcaaaagcttattggggatattcagcagaacaaattcaaaagtgggaggtgaatcttactatttctccagattatataagagaacatgatgtattcaaattggtaaaggataaggtaataattggttattattcttatctttttgaagatgaaaagaatgtaaaaatggataatttatttatcttgcctgaatatataggaaaaggttttggaaaatacctgtttcttgattttttaaaccgaatgaaagaggctggaattcaaaccattcaactcgattcagaaccaaatgctgaaggtttctacttaaaaatggggtttgtaaaaatcggagcattcgaaacttcgataaaagacaggtttatgcccattatgaaaatgaaattataataaatcaaattaaaattgaaaaactatacaaaatacctgctttcgctctttctggcttttgtcgtgattgtgaatgatggtgttttagtttctccctcaaaatcggcagattattatcaatcttcgtttgtaattctgagagctgagttagatttttctaattctcgtttatataaatttattccatctgcttcacgggtaaggacgctgttttcggttgttttaaagtatctcgatttaagagatgtttttagtcttcaaatcaggggagctctaaatcttcaactatttctttttcaaaaagtaagttcgtttataaagcagtctgtttttgtaaatgaaaccgttaactctgcaaattttaaaacaagtttatacatagcttaaagggattctctcttaagttttgatgcgcttcaacgcatacgatggtaaaataatgtctaatcatttatcattttcaaaatgtataaacaaaataataaaacacgtttagagcaatctaagcgaccacttcattggataaaaagaaaattaatagtaatactaactgctttcatgctcggaatgtcacacggaatgaatgtgcatgacgaagctcttaaaggaaatcaaaactatacggaacaacataagaaggattgatttgttgtttaaccgcaaagagcgcaaagattttgtctatttaatgtcttaaaaacgcaatgttcgcaaagctttgtgtttataggtcgcacaaaacttagcgaacattgcgtaaatcttagcgctctttgcggttacatctaaaagttaagttttaaaaaaaaaccgaagcaatttgcctcggttttctatttattagaatttcttaatcaacccacttataatatctcgccccaatcaaaacagggatctctttttcaattcggtctagaatccattcgttttttggagttctgacgctttgtttttgttcttttttgtgaaggctttcgtaagtgttgaaatcaatttctttactttcctttaaattttcaaaaagcttcacgtttgccagtgcagctttccattccggctgaattgtaccttcaaaaactttcgatttcgagccacttccgtaagctaagaatccaaattgggttccggcgatttctttattggtatcataataatgagccaaagtcgataacaatcccatgaaaatagatcctgtataaagattaccaattaaagacgaagccaattcagcaggttgtaatttctcggttacaaaatttctatattcttcagattttgcgacttccttaattttagcctgataatctgccggttcaatgttttctgaaatgatcttttcggcactgtctaaagtgtaaatttcagataacatgcgtcgtccttgaaacgaatagggaaggtgcatgatgatgctgttccaggtagtgtataaagtttccgtagtattttttagtttcttgaaggagaaataagcattgcgggtacgatccatataacattggttggaatactgaccgtcgaaaactggttggtctttatggatttctatttcggcttctaaattatcaaaccaaagatcgttgttggtattttgtgtaattgcttcttttgaaatgcttcggtacggtttaaagaagtcaaaaactccttttgtgctggttgcccaattttcgtcaaaagcgataattctggggttagaagtcactaacattgcaactgctccggcaccctgagtatattctccggtggagtttaaatcgtatttggcaaaatcggttgttacgacaattgcttttttggctggattcaattttacaaagtcaatacaattttgcaaagcgtcgacaccaccgatacaggcaaaagtaaaatcgactacatcacattccgccaaagtatcttcgccaaatttttgctctatcaaactaattaagaacgaactgatcggtttagagctgtcgataccactttcagttccaacatagatcctgctaatttcgtttaggttgatgttgtgatcgagaataagtttcgttaaagcatttgctccaaaaactactggatcctgatgaacatcaggtaaagtcatttgaattagtccaaggcctttttctaatttttcgggttcgatatttctggcagtcgccaaagtttttataggtaaatgtatgttggctacatcaaaagaaatagcgtcaattcctgttttcattgtcattttttttgaagccgataaaggtaaaattatgctcttaaaattcccttgttttcattcaataaaattcgggctcgctttacttttgaggaaaacagagcaaaaaggggtgaaaaataacaatttggtaattatataaaaactaggaattcgttaaaatcacttgcgaaaaatttctattttattgtttttaaataatttgcaataatatcaccgaaagctctttaaaatcattataaataacaacgaaatggttgtagttcatgtctaattgctttatttttgtctaattttttaaaacaaactactttaacacttatggcacaatctgcactattgaatgcttccatcttaaagaaagtggctatggccctttcgggaatattcttaatcacgtttttagcgctgcatgtttccttaaattttatttctattattagtgaagatgtttttaacgaagcttctcactttatgggatacaatccgctgattcaatatgtaatgcaacctgttttggcaatcggagtaattttccatttcgtaatgggatttgtattgactgctcaaaatagcgcagcaagaccaattgcttatgcaaaatacaacggagctgctaatgcttcatggacttcgagaaacatgattatctcaggcttagttattttggctttcttaggattgcatttctatgatttttggtttcctgaagttacttacaaatatattgcaggtacagcaccggacgcgacaagatattatggagagctagtgcataagtttcatgacccaatccgcacaggtatttattgtatctcatttgtgttattaggatttcacctttggcacggattcagttcatctcttcaatccgttgggatgcacaataagtattctcgattcttaagtaaagttggttatggatttgcggttgtagtaccggcacttttcgttatcatcgcattatttcatcatttcaataattaatatcaattataatggcattagattcaaaaattccaaatggtccaatatcggacaaatggacaaattataaagatcatattaatttagtaaaccctgctaacaaacgtaatttagatattattatcgttggaacaggtttggctggaggttctgctgcggctactttggctgagttaggatataacgtaaaagctttctgttttcaggattcaccacgtcgtgcgcactctattgctgcacaagggggtatcaatgctgcaaaaaattataaaggtgacggtgactctgtttacagattattttatgatactgtaaaaggaggtgactaccgtgcacgtgaggcaaacgttcaccgtttggctgaagtttcggctaatattatcgaccagtgtgtggctcaaggggtgccattggctcgtgaatatggtggattattggataaccgttcttttggaggaactttggtttcccgtactttttacgcacaaggacaaaccggacaacaattattgttaggagcttattctgcaatgaaccgtcagattggtcgtggaaaagtaaaaatgtacaaccgtcacgaaatgcttgacattgtaatcgttgacggaaaagcgagaggtattatcgctcgtaaccttatcacaggagaaattgaaagacactctgctcatgcggtagtagtaggttcaggaggatacggaaacgtatttttcctttcaactaatgctatgggaagtaacgcaacagcagcttggaaaatacataaaaaaggagcgtttttcgcgaatccttgttacacacaaattcacccaacttgtattccggtttcaggagatcaccagtcaaaattgactttgatgtctgaatcgttacgtaatgacggtcgtatttgggttcctgcaaaattagaagatgcgaaagcaattcgtgaaggaaagaaaaaagcaactgatttatctgaagacgaaagagattatttcttggaaagaagatatcctgcttttggtaacttagtacctcgtgacgttgcgtctcgtgctgcaaaagaaagatgtgatgccggttttggtgtgaacaaaacaggagaagcggtttacttagatttcgccgctgctattaaacgttacggtgctgaggctgctcacgtaaaaggattgaatgaaaatgacagtgctttagtaactaagttaggaacggatatcgtaaaaagtaagtacggaaacttattccagatgtacttgaaaattgttgacgaagatccttatgtaacgccaatgatgatttaccctgcggttcactacactatgggtggtacctgggttgattataacttaatgactaccattccgggatgtttctcaatcggagagtctaacttctctgatcacggagcaaacagacttggagcttctgccttaatgcaaggtttagcagatggttatttcgtattaccttatactatcggggattatttggctccggatattaaaatgggacctatctctacagatttaccagaattcgtagaagcagaaaaaggagtaaaagatcaaatcgagaaatttatcaataataaaggaactcattctgtagattatttccataagaaattagggaaaatcatgtgggataaagtgggtatggctcgtaatgctaaaggtttagccgaagctatcgaagaaattgccgctttacgtgaagagttttataaagacgtaaaagtacctggaagtgctaacgaatttaaccaggaattagaaaaagcgactcgtgttgccgatttcttagaattgggagagttgttcgcaaaagatgctttacaccgtaacgaatcttgtggaggtcacttccgtgaagagtatcaaacagaagaaggtgaagcacttcgtgatgatgagaactttgcatacgttgcagcttgggaatacaaaggaaaaccaagtgacgcagtattacacaaagaacctctggtttacgaaaacatcaaattagtacaacgtagttataaatagggtttagtccaaagtcctaagtccaaagtcttaaagtattaagctttcgatttttgactttatgactttagactttaagacttttaaacttatagaaaatgaaacttacattaaaaatatggcgtcagaaaaacgcccaagataaaggagggattgttgaatatcctattgacggaattgaaccggatatgtctttccttgaaatgcttgacgttcttaacgaacaattgatcaataaaggagacgaaccggtagcatttgaccacgattgtcgcgaaggaatttgcggaatgtgttctttgtttatcaacggagaagcacatggaccagacagaggagttactacttgtcagttgcacatgcgtatgttcaaagatggtgatacgatttttatcgagccatttagagcaaaagctttccctgtaattaaagatttagtagttgatagaagttcttttgacagaattcaacatgcgggaggatttatctctgtaaatacttcaggaaatacaattgatgcaaatacaattccaatcaacaaagacgatgcagataaatcttttgatgctgcagcttgtattggttgtggagcttgtgtggcaacttgtaaaaactcatcagcaatgttgttcgtttctgcaaaagtatctcaatacgctttattaccgcaaggtaaagttgaagcagttgaccgtgttttaaatatggttcaccaaatggatgcagaaggttttggtaactgtacaaataccggagcttgtgaggtagaatgtcctaaaggaatctctcttgaaaatatcgcacgtatgaaccgtgagtatttagcagcaagcttgaaaggataattttaaacgtatctttttagttgtaaaaaaaaagcatccgctatggcggatgctttttttttgttagctcgagaggagcgataggtgttagattgtaaatagatatcgctcctctggagctttttttataggtcttgttgaagttttataaatagagtaccccgttggggttttactgttgcttttttacgaatttttgttccatcaaaggagttgttattttgggttatctcttttgtgcttttactcgtaatagaattgcgaagcgctgatttcctgtttttcttttccttcgggttggataaaacaatttaaagtagttccgccaatctggtcaaaataactgatattgaatttgtggaaacctttttcgagtttcacgactccgtaggcttcgttgagccaatgtattccatcgttattcacgatcagttcattgtcaataaaaagcttcgatccgtcgtctgagagcgttgaaaaggtataatttgcagtttccggaatgtagatatatccgtcgaattttaagccaatataacgctcttttttcgttttccatttttcgctgcttatggtgccttcaaaaattcccgagttcactggttttactaattctaaatcctgaacctgctgaaataaggttccgacaaaatactcgtatttcaaaccttgtttggttggttttacagctaatgcaggttttaaatcaggatttcggagtataattttgttgattgaactttttcttccgcttgggctaatctgaacggtttttacggttctgaattctccttttggaacgtgtatcgcgacaggtttggtataaagttctgccgtttcatccggattatagccgtcgatggtatagaaaatttgtccatttttaatagtgggttggagattcaaaagatattctgatgtaatgacagcagtttcatttgctccaaacggtgttggtactttgtataatcttttctgtagttccagtttttctaaatgatgcggcatgcgattcagaacaaaattatcgtaatttttattttgtggggctgtccaggctatctctgctaaagcaaacattcggggataaagctgataatttagtttggccggactcgttaaatattccgaccataaattggactgtacgcccatgatgtatttttgttcgtcaatcgttaaactgtcaactggagtcgggttgtagttgtacattttttcgactgtgactaatcttcccaccgttaaaggttcatttggagaatacgcctgattgtaatccagatacaaaatgtgctccggattcatgatgacaaaatgcttttgtttggctgcggcaattccgcccgattctccgcgccaggacattactgctgcatttggagtcaggccgccttcgagcatttcgtcccaaccgagaatttgtcttccattgttgttcaggaatttttcgattctggtggtaagataagtttgtaattcgtgttcgtttttcaatcctaattctttgatctttttttgacagtttggacattctttccatctggcttttgggcattcgtcaccaccaatgtgaatgtatttgctagggaataacgccatgacttcggttaagacatcttccagaaaagtaaaggtttcttcttttccggcacagaagatatcttcaaacactccccagtattcaataactttataaaggcgatccggaaaacaggataaatttggataagcggtaacggctgcagtggcatgtcccggcatttcgatttcggggattacattgacataatgttcttcagcaaattttaccacgtccttgatttcttcctgagtataaaagcctccgtaaggatttccgtcaaaaaaataagggaatctctcgaacttatttcctacgagagtctgggctcttttcgagcctacttcggttagcttcgggtattttttgatttcaattctccagccctgatcgtccgttaaatgccaatggaaattatttaatttataactggacatctgagcgataaaatcttttataacatcaacagaaaaaaagtgacggcaaacgtctaaatgcaggcctcggtaatcgtatctcggttcatcctctatcgtcacacaaggaagttttatttcctgacttttaggtttgttcggaagcatttgcaataaactctgaactgcataaaacaatccttcttcacttccggtaacggttatttttttaggagtgattgcaattttatatccttctttttttagagaggaagcaggattttgtgttaggaataaaacatcgatagtgctttttttctttgaggtgttagcatttatagcagactccaacagctttgctgttttttgttctttaacactgaatttatttttctcaaaaagcactttaatttgcccatttaaacgaatactgtctccggtggctttgtagaaattaggagccggaatgatcgaattattatttaaggaagtctgggcacttccaaaagaataacaaaatagtaaaagaataaaaatattttttcgcatgattactttttgggtttgttaaacaaatgtaaggtttgttgggtgatttgcattttttttgcaaatgctatttgtgtttaaaagtctttataatagatgaattaacgttattattacactgtattctaatttgtttcgcaataatattgcattaattgtttacatttgctttactaaaattgaacatgcatgaataatgataatgaagtggttaattacaccaaggaagaacgtaaaaatcttattttaaaagagattaacctgcacactcgtgtaagttttgaaaccctttcggctaaattatttgtttcagaagatactgtgagacgagatattaatgaacttgaatcagagtccttattgattaaagtgaaaggtggtgcgatgacaaaagcctatcaccattcttcttccaatcaaacttatgcaggagaagcaaaacaaaccattgcacagaaaactttaggtttacttcgtgatggtatggttttattacttggtggtggaacaaccatcagagagtttatccgattgattcccgacactttaaacctgacgatttttaccgttaccgttttatcggcggttgaacttctggacaaacccaatgttaaaattatcatgattggcggcagcatttcgtcgtacagccaaatgtgtgtgagcggtgatgtttacaatcagctggcaaatattaaagtcgatttgttaatattaggaaccaatgccttagacatcgaaggcggcttttcagattcggactgggaaacagttcaggtcaaaaaagcgatgattcaggcttctgaaaaaacagccattcttacgatttctgaaaaactggatacagttctaaaaatgaaaattgccaacttatccgaggttgattacgtggtgacggaagtagaccccgatcacgaaaaactacagtcgtataagaaggcagttcccagtttagtttttgtttaatcccagttttttagtaaaaagttgatccagttttgatgaaaaattttatttaaatcttcatctgaatagccatgatttttaaagatcagaactagtttctgcaaatcggcaatagtgtttaaatcgtacggagattgctctgtaccaaaagcaccatcaagatcagaacctactcctatatgattggcatttccggccaattgacagatgtgatccatgtgtctgaaaacagtttcaagattgcagttagttccctgtggggttgaaactcctctttcccaattcggaacgagcatccaagcgtctaaagctcctccaataacggctcctcgtgaaatcaaagccttgatcatttcgtcgctgtattgccggttgtgatctaccagacttcggcaattgttgtggcttgcccagactggtccgttgtagtggtctaatgcctgccagaaagcatcatcacataaatgagtggcatccagaataatgttcagacgttccatttctttgagtaaatcaattccgttttgctgcatttttccggtggcatctgttccgtttgcgtatcggccaggaccgtaatgtgcgggtccgatagcacgtaatccgtattgatgtgctttttccaagtaagaaatatcgataatagaatcggcaccttctaaacttaaaatataaccaatcggttttttatcatttggcgttccgtcattccataaatcaatctgtttcagtagtgattttttgtctgtaataggagttatttctccggcttcttccatggctttgtaccaggcgagctgcccttgtgtttgtgcccatgcctgctcaggagagttccagccgggaataagactgtcgggttttacaaatcgtgcaatttgagtggcaactacaattccgatattcccttttcgcaaatcaggaaaagaaacagtggcacgttcacgatcgggtttgtctgtcatgcctttttctaaatggcgtaaagtggcaacatcgtttcgtaggtctctgttccattccatcgcattcatgctaaggtctaaatgggcatctattataaacatagtattttaaggttctaaggttctgaggttttctacaaggtctatggtctttttccttttctctattctcttggttctattttcttcactagatattaattttccgatttctcgcaaccacaagccactgatcacaaatctgctgttcgctattgactacctgaacggaatcgtataatgcgcaagtgggacaaacgtggtagggctgcgcataaatagtatcaccaatcgcatagttgtttttaccgcgattttcgatgaccagatgctcttcagaatgtgaaattgggatcaggtcgttgtcatttaaaatgaccagtcttttatcgataggattttcagaagcgaccgctttgtacccaatgtcgatacaaaaagtagtatcggttggttttgagatgatggttccaacgattgctaaagcaggttcgaaatgttgctccggtaagttaatttgatagttggaatcccagaagacaaaagttcccggactgcattctacatttttctgcgtggcataaaaaggaaaggtgttagatcctcctgctacaatttttaattcataacccagttttttctgtatagtttcaatttcttcgttgatgctaaagaagatatttgaggcaaccgaatttcgatgttcaacatctcctttcagatgaccatcatacaggtgaatacctgcaaaatgaatatttttgagtttgatgatttcatcaatcagggcttcccagtttttagaaattgaaattccggttctgttcattccggagttcagatccaggtaaagggtaagttttaggttgtttttatgtgccgcgatatccagtgcttttgccgattcgtaattgtcaacaatggtcgaaaaagcggtagcaggatattttttaagtaaggaaatccatcgctcttttttattgcctacaggctgataggcgagaagcacgtcttcaatttcgtgtatggcagcaagttctgcttcggcaattgtggcgcatttaactttgttgatattataggttttaaacaagtccagaatctccccaattttatgggttttgatgtgtggtcttaatttttgagtatcaccgttcacagattctatcaaacgttcaatgttggtctgaatgcgatcttcgtaaacggccaaaaatggggtatctacacggatttcggagctaattttccaccaattgttttgcataacttagtttcttgtttttttgacaacttcaattaaattctgaaaagccttaagtgactgctcataacttaaatcaagcatcatttcttttgtgaataaattagaaccaattccaacgcaaactactcctgatttgaaccatgatttcaggttgctttcttctaaggttactccgccggttggcattatttttaagtttgggaaaggggctctgatggcttttacatatccgggaccaccaattttatcggccggaaaaagttttacaatttcagcacctaatttattggcatgaagtatttcatttaaggtcgcggctccgggaatccagtaaatgttgtttttgaaacaatagttcccaatttccggatcagtatgtggacaaacaatgcaatctgctcctaactgatgaaaggtttcggcatcctgaacgcttaatatagatccaacggctatcttaacctctaaattatttgcttttttaaaatggatcatttggctaaaaacttctttagcatcagttgcacgagcggcaaactcgataatttttatgccagcatcagccgccgattgcaagactatttgggctgtttcaatgttgatttgtgtcactaacggaagtacaccttgcgtttttaatatgctgtacatgtttttgttttatctgttaattctgttacttgagccatttttaataaaatgatttacttcgtcaggagtgcttatggcaaaatctccgtgaatactttgtttgatgacgccgcaggcagttgcccactcgatacaatcctgaccggataatttatgagtcagtccgtataataatcctgcgttgaaggcatctccggaacctatttggtctgttacgacctgtattttgtgttcgggtgtttgatagaaattgccttcatgaagcaataaccctttgtataaatgcgccggtccgtcagactttctgaaactcatggcgagtgtttgcagaaaaggcatttttacttttaacaattcgtatgttttttgaaaacggtcggcatcagattctcgtgcgtcagttttgattccgaaataaatttcaatcgcatctaaatcggcaaccgtaatggtgctgtattgaagtaaatcaggcatgacttctgacggatgttttccgtattgccataatttggagcgatagttaaagtcagaagaaataggtagtcctttttgatgtgccgcgagaatggcttctttacagaccagagaggcttcatgcgaaactcccggacttattccggaccaatgaaaatgggttacatcggccaaagctaaatcccagttaatctgatctttttgtatggtcgcaaaggacgaattgcttcggtcgtaaatgacttgcgactgtcggatctgatttccggcctcgacaaagtataaacctaaacggtctccaccgtaaacacatttcgaggtgtttactttgtatttctgaagttcgtttacagccaattgtgctaagtcgttttgaggtaatcgggtaatgtagtcggtgggtattccgagttgggaaagtaaaacacaaacatttgcttcggcaccgcccacgtaaatttttatttcgttggcttgtgtaaatcgatttccgttggcaacattcatccggagtaataattcaccgaaagttgcgatttttgtttgtgaggtatttgtattcatgttttttgtttttttgccactcccgatagttgtcgggattatattgatttataaacttagcgattatttttttaacacatagaagcatagtttttgaaaccttgtaataggcgtttcacttgcattaatacacacagctatgtgcgaaaacgagtttttttgttattctcaatgaagtaaaaaaatctatgtttctatgtgtttaattctttcgccacgaatttcactaattttcgcaaatcagtgcgtgaaaaattaattcgtgctaattcgtgaaattcgttgcaaacaaaaaaatcaatttaatcattaaaatctgtgacataactttttaatataattcgaaaacggcttctacttcaacgggaatattgtccggtaaagagcccattcctacggcgcttcgtactccaattccgttttcgggtccccatacttcggcaaataattcactgcagccgtttataacgtatggatgtcttaagaactcgccattgcagtttaccattccgagtacttttataactttttttactttgttcaggcttccaaaattggttacaattgtagaaagcatggttaatccgacttgccttgcggctaattttccttcttcgatgtccatgtcatcaccaattcggccaatgattaaggatttgtcgtctcttacaggcccgtgacctgaaaggtataaatatttaccatcaactaaatagggcttgtatattcctagaggctgaggcgccggaggaagggacaatccaagggtttcaaatttttcttgtggtaataaattcatgatattaatgtattatagtgtttaaaataaaaatgaaaatgattcctaaaacggatactaaggattccataacggtccatgatttgaaagtatctttcaggctgatgttaaaatattctttgaacatccaaaagcttgggtcgtttacgtgagagcacattaaacttcctgctccaacagacagtactaataggttagggtcaagtccggcagtttgcaataaaggcaatagaaccgtggcggtcattagtccggccgctgttgctgaacctacgcaaacacgaatgatcgctgccatcatccatgccaataaataaggatgaatgttgatttgtgttaaagctgtaacgatggtttcgtttacaccgcttacaatcatgacttctttcagaccgccggcccctccaacaattaaaacgattaaggcaacatctttgatcgcaacggcatagtcctccattactgaggtaatgctgcggttcattctgatgcctaaagtgtaagtacagatcagtaaagagatcagcataatcatgcttggttctccaattgttttgcagatatcagccagagtttcatttttagaaatcataggtgctatcgaagtcactgttaatccaaaaaccggaaataaagcagagaacagactcaatgaaaagcttggaagtttgccttcgtttgcaacttcttcaacgtttaagatttcgtgatccgattcggttttgatgtttttgagtaaattcgaaaacaatagacctgcaataaaaatggttggtatggcgatgataattccataaactaaaacgagtccaagatcggcattaaaaatactgcttaaagccattggagacggatgtgggggtaagaaaccgtgtgctactgaaagcgacgccagcattggaatacccagatatacttttgacagcttaaattgatgggctactgagaagattaagggtactaacaaaacaaaaccaacactataaaatagaggtatcccaacaataaatccggtaatcattaagccaaggcgaacgtattttttacccgtccatcccataaccgttttggcaataacattggcggcgcctgatgaaacggtaagtttaccaatacaggttccgaaaacaataatcagcgtaatagatcctaacatttcgcccaaacctttttgtacagtttgtgataaagtatttattggcaggcctaaaaaaaggcctgctagtaaagctgttatgataaaggcaataaacggattgattttaaaccaggcgatctggacgattagaaacgcaatgcatgccgtaagaattaaaatgctcatttatctgttgtattagtaactccgcagagtgtaattcgtaaaaaattgatttaacacatagaaacatagatttttttacttcataaaagaataacaaaaaaagttagcttttaaaacatagtcccgatgcatcgggatatgtgtaaatgcaagtgaaacatctttttaggattgcaggatctatgtctctatgtgtttaaattaattatagcaatggatttttattgtttatcccaccagattcttgtagtaaaagtatcaggtccttgttgtttaaccgcttctgctaagttagttgtatttactgaatattcactggttggatatctaagacgccttggtattgtgccatttgttacatttccagggaaatttacgggagttaaaacagggtatccggttcttctccaattggcataaatttcctgttcgtccacaaataaagctacataaacctgggtatgaatttgattcattttggcttcaaaagtccctgttgcgttataaggattagccgttaaataaggagttgcatctgtaatggcgtaggatgttccataaattcccatatttaggaaagatgctttcactcctttttcatataagtccttatcagtttcggcggtgtaccatcctcttgcagcagcttcggccagatataaattagtttcggcattgcttattaataccagcggagcatcgaatcttaaaatggtattttgatttggctcagaataagtggcttgctctaatggtgctaatgctgttgtggttccatttgggaaacctttctgcacggccgggttagtattttgtatagttccttgccaaactccggcgtaaacactgattcgcgggtcagcagtagtttttaataagtcaatgaaagttttggctagtttgcctccctcagtattagcttgaccgtatgatccgcttgcataatctccggttcttgagtcaaaagcaacggggtttctgttgaagttatttgggccgtcggtatagttcatgatggcattgtctgctccattaacgattactccgcctgcaatggctttggtaacccaggtttttgataaagcgggatccgctttagttaaacgcaagcctaagcgaagcattagggagtaagagaatttcttccatttggcaacatttccgttatagataaaatcagcagtaccgaaactcggtttcgctggatccagtgcagtcgcagcttcatcaagctcttttaataaatctttatagatgaattcctgcgagtcatattttggaagaagtagatttgtagtgtatgcctgtactgcttgagagtagggaatacttccgtacaaatctgtaattttatgatataaaaaaactttccagattcgggcgatattaagtttgttgctgtcgttcggcgtatcttttacggcattaattacgatttcagtttcatttaatgctgttgggtatgcctgattaaagtaaccggaatagtatttttctccatctaagtatttatcacccactccggagacttctttgtaagtagcataatgttgcagcattccgccacattcaagcatgttagtgaaaaaataattattagctaggccgtcaatttgagctctgctgaaaataaaattaggatttggtttttcaacggcattgggattagtgttaatttcttcaaaatctttggtgcacgctgtcatgcaacccaacagtatgcctgaaatgtataatagggttatctttttcatgtcttttagtttaaaaattagggatagggggtgtttaaaatttaacatttaaatttaaaccgaaacttctggttctcggaactccaaattgttctataccctgagcatttccggcactaaatacagattccgggtctacgtttggagtctttttgtaaagaatgaataagtttcttgctatgaaagaaatggatatactttgaagttttgataaactgcttattttttcaatagggaattgatatccaataataacttgtcttagttttataaagcttgcgtcgtagacaaattctgatgaaatgttttttagaccatcataataatttctaaggtctttaggagcaattaccatatctaccggatttcctttagtatcaacacccttaattggtaagccgttttcacgaccttcaagtgttaatttggttaatcccatacgggttccatataaatcagttccggagtataaactaccaccaaatttaccgtcgatcaggaagcttaaagatatgtttttgtatttaaattcattattaagtcctgctgtccaaggatgaacaccctgtcccagctcctgaagcggacctcttgctacggttgcggtattgccacttacattgtaaacagtatttccgtttgcatctttaagcggtttataccctttaatagtgctgtaagggcgtcctacgtcactcgtaataagggcataatcgtttacagaaattgccatcgtaatcgagtttaattgatctgtaagtgcttcaacggtatttttgttataggctccgttaatacttgcgtcccaggagaaattactattgtttatgattttactgctaattaataattcgactcctttatttctcatttttccaatgtttagcaaagccgtatttgcacctgatgcatttgaaatggtcgtttgcacaatgtcatttgtggtagcacggttgtaccaggcaaagtcaacattcaaacgattgttaaagaagcccatatcggttccaatttcaaaggttgttgaagttaaggggcttaatgtaggatttggtactcttgttcctgtagggacttgtacatgttggtttttgtgtcctccctgaaccattgaatacgatcgatttagggcgtatggatctggtgtagcacctccaacctgggcccatgaagatctcagttttgtaaatgaaatccactccggcatttttacaatatcagaaagaatgatacttgttcctatggaggggtagaacactttattgttttctttagatagggttgaaaaccaatcctgacgtcctgtaacgtttaggaaaattacatttttgtaatccagatctgcggaagcataaacagagtttgtttttgtttttccataaggataagtatacgataaagtagtaaaattggttggagcgaaaaaatcatcaaggacaaaatttgaaccctcaaggcttacttcatcgcgtaaggttgtacgggagtttactccaagtaatgcattcagagaaaaatctttatacaagttctttttggtatagtttagtatagcttctgagttcaggtttgacagctttacgcgggaaccttgtgcgtatccaattggattgtttaagcttgtctttggaatgtatccaaagtaatcgtaatctgtgtaatcctgtccaattcttccctgaagaaatagttcgggtgtaaagtttaattttacgtttaacattccaaggaaacgatttttagtgtccctgtttttgattttattgatggtgaagtaagggtttgttgcaaccggaacaggattccatgctatttctttaccgttttcgtcataaccaggtgaaagatttctaatgtctaaagtgttagcaagcagataggtggcccagttcgggttggcttctgcatcggaaaccgtaattctgttgtttgatttctctatattgtattgtgcgactacatcaaattttaaccaattggttaagtttacattgctggcaatgttgacacttttacggttgaaatcagaatttggtacaatagactggttgtctgtattagagaaggaaagacgtcctgaggctttttcgtttcctcctgaaagtgcgatcgaattgataaatgttgttccggtttcgtagaagtttttgatgttgtttttttgagcaacataaggtctttttactccgtcaaattgaataacatcagttccgtctatttttgctccccacgaccagcgaccaaattctatagctttttctttcgttaatggtttttgtcctgcatctccggctccgtactcgtactgccagtccgggatcacagccggggtttcaaaagtataagaggaattgagttctacaccgatacccttttgtgcgcctcctcttttggtttgaataagaattacaccattggcagcatttgctccataaagagcagctgcagttcctccttttaataccgtgatgcttttaatgtcatcgggattgataactgaggtaccgtcacctctatcgacgttcattcttggtgagcctgctccgtttccggttccaggcagattgagttgtgtattgtcaattggtaagtcgtttaccacatacatgggctggttgtttccgtttagggaaccatttccacgaatgatcaccctggttgatccgtttgcgcctgttgcagagctgcttacgtttaccccggcaattttacctactaaagcgtttgtgatattggtttcttttgccttggtgaattcagttccttttaattcggtaacagcataggcaactgctttgttactttttttaacccctaatgcggttactaatacctgctccagtacattttcggcaggttttaaacttattactacatctgtgaccttatctagtttatactctaaagttccatagcccatgtaagaaatgatgatgtgagtttcattttccggaacatttagtttaaattttcctgtttcatcggttatagtagctgttttcgaattgcttttagcataaatagtagctccggcaattggcattccatcgtcctgaccaatgacctggcccgaaatttcaatctgactgcttttttgttcaaagaggtgcgttttaattgcagtctcttttgcatttactgagaagattactcccccaataaatactaatgaaattagctttgctttcataatactttggttttcatgttttattttggtttttattggcgatcaaatatatagataatttttattcatttgcattttttttgcataaagtgcattttttttgcaatatttttttctgaagtgtttttataatccaaaagaaatgaggtttctaaaggtgttctgagaaaattttgcagaatgagtttttagggaaagaattcgttttaatcttaaaattcgtatttttagaagggtatgaacgggtgattttgcttgtttttgatcggaaaagcctaaaaaaataccattcataattcaatataaattacgaatggtattaggatcaacatgaaaggagtggtgttgggttagggtttagcggtttaatctacatcccaccaaactttagccagccagctgttgttgttgtatttggcactggcggccaaaaagttttctcggttgttggtcgattcttccaccggatagggtattcttgtaggcataatacctcgggtttcagagtctgcacgagtaatttttatcatcacggggaagtttgttcttctgtaattgctataagcttccattccgtttaagaataaagtgagccattgttgtgtggcaatttcttccaattcttttccaggggtaagacttttagtagcaagaaaagaagtaatagcattgttgttgataatgctggcgtctttaaaaataacccattgtctgataccggcttcgattccttttttgtaataatcttttgtgtcgcccgggtggagtcctctgaaagaagcttctgccagaagtaattgtgtttctgaataagtaagatgcagatatggggcactgttttcgtataaataaggttgaatggttgataaagcgtcactatcaggtttgtggtcccatctgtaatcattcggattaatgccttcgtaaacgcctttcggatttactctgaaccatatgttttttcttggatcatcttttaggatatttaatattgtgatggtaggatgatcgtatacgcctccggaaccctttaaggcttgagaaagtccgtttccattgttaaaagcaccaactgtttccggaagggtggagtcgtgtttcatgtagcagttgtcgtcgttgcttgtaaagatgccattggtaaccgcttttttgatttgttctttcgctaatgccgggtctacttttgaaattctcatagcaatgcgtaatcgtaaggaattgatcatttttttccacttcgagacattgccttcgtaaaagagatctccttttattgcatcagttccagattgtaattgactttgtgcttcgtctagtactttaaaaaaatcggtataaatgtctttctgactgtcgtatttcggatagaaaattttctgcaaatcgccaaagcctgcttcagaatagggaacatctccatacaaatcggttaagcgttgatataccataactttcagtgtttttgcaacagcatttaagttggtgtattctggttttccttttgttctttccagaacatctgttaagtttcgcacgattccgcctccatagtttgaaaaccaaagagcgtcttgatattctctgttagaaatataaaaagagccatagttggcgacgctccatgatccgccaagatgttgaataaaaccttctccatatataaggttggctctccattgctcaaaccagccaccggataaaccggcttgtattccggttatctgagtgtaaggttcaatggtttgaaagccttcagggttggtgtttgtttctctgaaaagttcatcgtcagcacagttagttacggtaagcattagaagcaagcctagcgcatattttgttagttgtaatatatgttttttcatttcgatgcagttaaaagattagaatgataattgtaggttaaagccgtaagaccttctgtaaggtaaagagccgtattcgaaaccttgtccattaccgcttgtgtaagttgattccggatcaatgtttgggactttagagtaaatagtccataaatttcgggcaataacagagaatttaaatctttcaaacccggtaccttttaaccatttttttggaaaatcataacctatagagagttctcttagtttaacataagaggcatcataaataaagggttccggtgtggtatcgtctccatataagcttctccagtaagtttgcggattcaccggtgtggtgttgtctttgtatccggttacattaccgttagtgtctctaacttcatttacaccgtctacaataagtcccgcaccaggttgtaatttagcgatatctgctggtgtttttccggaggcgatctgctgcgcaaaccacgcattaaattcatctcttccgtcaagagttctgctggacagtcctgcagcagcagcgttagcgttagtcatggagtatagtttgcctccaaatttcatgtcaagattggctctaagactaattcctttgtaggagaactcattggtaacccctccaacccaatcaggtgccgcttttccaaagctttccaaagttgatgtcaacagaggatttccgtttgctcctataagaatttgtccatcaggagatctttggaattttttaccgtaaatctctgtagtactttgtccgacttttgcaacaatttgagctccggcccatcttgcattcgagatcacttgtaggtcggttttgtctgttagctcgattaatttgttgtcatttttagcaaaattgaaggtgatgtcccaattaaagccatctggttttctgaaaattccggcggttattaaggcttcaaaacctttgttttcaaccgtacccgcgtttgcattaacgccaacaaaaccggaagcttgtgaggtgtttaatacaatcagttgattttttgttctggtgtagtaatacgataaatcaacttgtaagcgatttttaaagaatcctaaatcaattccggcttcgtagctggtggtaagttctggttttaggttgttgtttggaataatattattgttaatcgaaccgatagggtttcctaacaaaggtttggcttgtatgttgtaatttaataaagtggcgtatggagcttccagtgcttttgcggtagttgcccaggaggctctgatctttccaaaagttaacacgtcattcttaatgtccaatccatcagtaaaaataaaactggaagatacagacggataaaaataggaatagttattattatcaagagaggttatggctgaggccagagttgagttccagtcgttacgtcccgtaaaatcaaggaataaatagtttttgtaattggctctcacgtaggtgtataaagagcgtactaatatttcatcatttgttttcggacttaagactgaggatagaaagttagattgtttgtttactccattaaaaaacatgtccgaaagagctacccccgaaacaattctttgggtgtttctttggttagcaccaacgcccactgacagattaaaatcgccgaacgatttctgagcatttaataaggcttcggcgttgtattcctgaaaggttgtactgctgttgattaaagatccattctgccttgcagtccaggtggttccttcgttgacaaaatcagaactttcaaatgtaaatcgatcaattcctgctcttccggtagcgcttagccaatcggtaaaggcataggttgcgctgaaattccctaatattcggtgtttttcggttacatttttgttttcgtctaatacaaagtaaggatttaatttatttgggtcggagttccattgatagtagttgccgtttggatcttcataattttttaaccaggcttgattgaagtttggtgcgagtgaggttactgtcaatccaagattgccggcatcgtctgaaagggcgggtctgttgttggtgttttctgtaatgtaattgaatttggcatctaatgtcagttttttgatttgagaattgacacctaatgtgaatgtatttcgtttaagaccggttttaggaacgatatctgtagcatcaatattggaatagtttaatctgaaggtggtattatctccaccgcctgaaagactaatgctgttgtttacggttacggctgttctgaaaaaatctttaaagttgtttttcatgtattcgtaaggtttgtaggatccgtcaaagattcgaactgaagtgttgccgggagatccgaatcgtggaccccaggcgctggtagtagcatttcgtccatttgcgatttcatcagtatttggcagtgttccatttgttcctgtgccatattctttttggtagtctttgtatcttgaattgatttggtcaaaagtagtagtgctgttccaatcgactttcaaagagtttctttttccttttttggtagtaataacaatgacaccattggcgccacgttctccgtaaagagcactggcagctcctccttttagcacagaaatattttcaatgtcatctgtatttatactggacaatccatctccattgtctcttccttcggagtatctggccgatttattgtctgttatgcttccaagtccggtgtttcccaaggtaactccgtctacaacataaaggggttggttgtctccgcttatagatcggttccctcttattacaattctggaactgcctccaatacctcctgtggtttgagaaatgttaacacctgctacctttccgtacaaagattgggcaacacttattgtgggattgtccgccagatcttttccttttacgtcctgaaaagaatagcccagttcttttctttctctttttagacctaatgcagtaactaccacaccggaaagggctgttgctgcggcttcttttagttttatgttgaggttgttagaattgcctacaaggatattttgaggttctaatcctaaaaaagagatcgtcagtgtttttccttcttgtacgtcgatagagaatttaccgtcaaaatcggttgtagtacctcttttttcttcttttatgcttatggatgctcccggtatcgagatgccattagtgtcggtcactgttcctttgatggtttttacttgcgcctgggtgacctgcagcgcaaaaaagaacataaataataaaatagtttgtttcattctttgggtttttagttagttgaggtttattgattgattgtttttttgtttcactggtgaggtgaaagagtttcttaattcgtttcctgaagacgaattattagaaatagaatcctgttgcttttactacagttgtggtctttactgtagctttagtattacgctttaaagaataaggaatctgcttgtggtattttagcgttttgcttttttattgcaaatgattcgtgactatttgtaagaatcattgttggcggtgtgccctttaaaagtgggtgttttttcataattaagtgttttttaaggtgttgtgttttttaatcagcgatcaaatatatataaattatattcattgttagcaatattttcgcataaattgtgcaagatttttgcataattttttcagataatgtttttttattatgaaaaatccgatatttactgggtttgtagctctttgtaggagggtttgtgaaactcaaatcgtatttagactttttgttttaaaaaaaaggtatttttaccatatgaaaatcgcacttatacaatccaatctttactgggagaatgctttagagaacagaaagcaattcgaatccaaaatcaatacaatcgatactgacgttaatctgatcgtgctgccggagatgttttcaacgggatttaccatgaatgccgccgcagttgccgaaacaatgcagggagagactatctcctggatacagtctttggcgaaacaaaaaaaagcagctattgtgggaagtcttgttattgtggagaacgagaagtattacaatcgaatggtatttgtttttccgtcaggtgaaattcaatattacaacaagcgtcatttgttttcgcttgcaggagaagatcagttttataccaaaggagatgaaaaagtaattgtgaattatttggattggaagatttgcctgcaggtttgttatgatttgagatttcccgtttttgcccgaaatgtagagaactacgatttactactgtatgtcgccaactggcctaaagtaagaactaacgcctgggatgctttgcttaaggctcgcgcgatcgagaatctaagttatgtaattggggtgaacagagtagggctggatgccaataattttgaacatattgggcattcgcaagcggttgattttttaggaaattatattctcgaaccacaggaaacggaagatgtttttgtggtggaactggataagaacactatgttagaaacccgaaaaaaacttgattttttaagtgataaagatgtgtttagaatcgatctttgattctaattcgaaagcttatttttgaggttcttctaagacgataatttcggtttcaggatttttggcgcggacagtaattttttggtacgcccatactgttccttttttgaaggcagaaatgtttaatttgccttttcttttggctccgttgactcttaccgataagttgacggtattatgatggttggaatacctaacgtttccttccagaatagccagtttgtcgatgggttcaattgtgccgatattttcaagtatgcttggatttttattcgctttttcaattgctttttcaaaaagcagctcgtctgaataagctttggcgatatcggtgatgccttcgggagaggttgaagcggccaaaaatccaattaaaaacagacataggaagatggaaggtaaaaaccatttccagtttcttttgaaccagttttctttttcaatccaatcgttttccatagcgctacgctcagctattaaaatttaaaaggctttcctttttttctcctcgtcttttttctttttttctgcctgttttttctctacttcaggattgaacgggacgcttaaatcaatagcctgatcgacatcccaattggtgcggacatctacagcagtttggtaataaaagacttcttcagcgtactttttattcaggaaatctccggagtcataaattttgtttttattgtcgtcgtagattattcgaatcgtaaatttatcagggactaataaattgaattccattttagtcttgccttcagagtaatcactggcgtatacaacatccccttttgcgttagttgcttcaacaataatggggaaacgttttacattttttaggttcagaaccaggtttccataatcggcaggttcttttgtgcttagtttaatggccagagtgtcattggatttttcgtaaaaatcagttagtgcgcccgggaaaaatgttatgctgtatttttcgacaggctcttttttgaaatcaacatagagtttttgctcaaattcatcgtattctgtcgtaaaatctacagcagtcgaatctttgttaaccagtctgattttggatttgtcaaattttaccagcggagtagccgattctaaggtaaatcgatcacggaaattgatggtcccgttttgaacagcggttatgtttaaagtgtctttcttttggtctttaatctttacactaaatcttttgttgtatttttctttactaacctccactgctagagaatctgctttagcttttaggggtttataccaaatttgcagggaatcttttttcggaaatgcggtaacaatggtttccatggtttcgttcccgtgtttcaggaccactttaggtttcgaaagtttaaagttttgtttgccttcataaggaaggtacagtctgtttcctgaggcttgtacaggttttacagctttaaatggaagtacctccttaaacaattccaattcaaaaacagtgtcgttcggaacggtaatatagtgtttgataaaaccgattttatcatctttagggttgtatctgttgttgtttcctttgtctttcagggccatcagcaggtattttccggcctttaaattttctagtttgaaagtacgtaaactgtctagtgtattggtgatgtagcgtgggctttgcttgtaaattaaggaatctttataggtgtcgtttacttcataaagcattaccgaaacaaaattatctacatttttctcataagcatctttaatttgtccgcttatcgaaagcgaatcaatagaagaacctgttgaaaagacatatttgaattggtttatcgagtttccttcgttgttgtctgctatactttgtccgaagttaaaactgtaggtagtgttcggctgtaaagtgtcctttattttaatagtaatcactttactcgctgtggtaggtaaaatcaatggctcatgtttcattggaggtgaaataataagctgtttgttgaggtttttaagttttacatactcgtcaaatcccagaataatttcgttgcctttaaaattagtgctgaaatttttaggcgagctgtatttcaataccggtgccagtgtgtcttttagtccgccggtaatgctgccgcgtttggcacagcttaacataaaaaagaccagtaaaaatgcaatatatctaaagttgtttttcaacataacggtttctgaatttgattgcacaaaataacaattatatttgctttaattgaaactttttagccatttattaggatttacagctttcgctgacggttcttttttttaaatttcaaaactataacagcatataatttcttacttttgggttaaaatataatttttcctaagttttgatcaaaagattttttattggtttcctgattctttttctgatttcctgtagtaagaatgaaaagccggttgttgctttttattactggaaaaccattctgaaattatctgaaacggagaagcttgctttgaaggacaatcaagtcactaaactttatgttaggtattttgatattgggcagcaacccgagacccaacagcccattccgcttagtccgattcgttttcaggatgccgtaactaagttcgaaattgtacccgtagtatttattcaaaacaaagtcatgttgtcttctccccttgatgtggaggatctggcacagaaaacagttcgtttgattgaagaaatcagcacgaagaacaaaattacatctcaggaaattcagatcgattgcgactggacccttaaaagtaaagacaactatcttaaatttatggagagtgttaaaaagctttccggaaaaaaactctctgcaacaattcgcttgcatcaggtgaaatattttaagaaaactaaaattccgaacgtagattccggagttttgatgtactacaacatggggtcaattgctcctgattccttaaattcgatatacgatcagaaaattgcagaacgctatttaaaaagcctgaaaaagtatccgatgcatcttgattttgccttgccgatatattcgtggggaattcatatccgaaaccaaaaagtgattggtttacgttctaaaatgaatgtagcggaactcaaaaaagatcccaattttcaacaactaagcggaatcttttttaaagcaaaaaaatctaattataagaatggcgttttttatgaagaaaatgacctcttaaaaatggaggccatttcggcagcagatttaaaacaaatggcggaagaactgagcgagaataccgcacagcagcccaaagaaattatattttacgatttagacgaattcaatttaaaaaactatgaaaagaatatttttgaacaagttatttcttgtttctagtgcggttttactttttgcatacggagtaatttatgcctgtgcagatggcgattgggattattttggatcgtacagttctaattttactcccgaaacttttgcagacaattcgtatagaccgcttttcctgtcgggtggaattttctacggaattggttttgataccgagcacaattcccgtttcaataaagatattaagtccgattggggaacctatcttaaagggaaaatcgataccactaccgtaaattattttttaattggagatgaaaaaccggattattactcggagaataaaagtgcgataaaaaacaaggaagagatcaaagatcttcatgtgtattataaaagcaaaaaggaaaataaatcctctttgaagtgggggaaaaagatttcgctgaaggatggtaaagtgaaaagctttgtcgagtttttgtatctggcacaaaaaatagaaaccgtttctatcaacagagattattggagttacgatccggtggtggccaaaacgttcaacgatgccaaaatgattcagtctatcgagaatgtgtacaatacgacttcggatcctttcctgaaaaacagatattggtttttgaccatgaaagctcgtttttacagcaacaacaaacaaaaagccgttgatttttttaataaaacagaaaaatcggttcctaaaaatgtgctgtattaccgtggactttcctacgtggcaggagtgaatcacaagcaaaataaatatgcagcttcaaactatttgtacgcacaggtttttgataaatgcccggaattgagaaccgttacggcttattgttttagtccaaaaaatgaaaccgactggaataaagcattgacgatggctaaaaataataaagaaaaagcagcgctttgggctgttcgtgggtattacaaagacgaaaaaaagtccattgaaaagatctatgaattagatcctaaaagcgaacatttgaattatctggcaacacgattagtgaacagacaagaggaagcgataaacaattcgtttcagaaggatggaggagaaaatcagcctatgaagaaacttagtgtggctgaaaacaaaaccgaaaatcaggtgaaggtggatcaaaaaacattggatttaatcgctaaaatttcggcagcaggaaatacagaccgaccttatttatgggatttgtctctggggtatttacagactttaaaaggtgattatgccaatgcagataagaattttgataaggcggtaaaaacgcttcctaaaacagaactggcaggaatgcaattgcgtttgcttcgttttgtaaataatttgagcaaaatagataaacttacggataaaaatgaaaaaacaatcctcgccgatttaaactggttgtattttgaacttccaaagaattacaaagggcaggaattccgttatcagaatgcttcttcctggagcagaagttatttgtcaacgctttacagagaaaaggggaatccggtaatggccgaaatttatggcgaatcgcgctacagttattggaacgatggaaattcattttacgacaatgaaaaagttttattagacatgaaagctttcttgtctaaatccaataaatctgaaattgaaagtatcggagcaggaatttatagtttgaagctaaaagatatcaataattttcaggcggttgaggcaacctttaaaaacaagattcctgaggctattgagtacatgaaacaaaccgattcggttcaatacagcaagtttttagggaatccgtttaacggaaatataaaagactgtcacgactgcgatcacacggcgtatcaaaaaagaaaatatacttttatggatttcctgactaccataaaggaaatgcagggtaaactggctcaaaaagaagacgtgtacacgaatagcttattgttgggtaatgccttttataatattacccatttcggaaacggaagaactttttatgaaatcacgattataggttacggctcaagtccgtattcgttcagagattcaatgaagcgaatgataaccaattgtgatcttcctaaaatgtactatcaaaaagcgttggaagcggccacaacaaaagagcaaaaagcaaaatgtatttatatgctggccaaatgcgaacgaaacgaatattacaataataagtacaacaaccttaaaaactggtgggaagctgacgatgataagattaattttattgcctggagcggttttaaagcgctgcagaaagactattcggatacgaaatattatcaggatgttattgccgaatgcggttactttaatacgtatgtaaatcaataattgaaattaaaatttagaggttatggtaaataaaattgagcatatcggaattgccgtgaagaatatggaggacgccaatgtgctgttcgaaaaattattgggcgttccgtcctataaaatggagttggtagaaagcgaaggggttttaacctcgttctttcaaaccggaaccaataagattgaacttttggtggcgacgaatcccgaaagcccaattgcaaagtttttggagaaaaagggagaaggaatccatcatattgcttttgatgttgaagacattcatgccgaaatcgcccgtttgaaaaacgaaggtttcgtgctgattaatgacgttcctaaaaagggagccgataataaattagtggtttttttacatccaaagaacacaaatggtgttttggtagagctttgtcaggaaattaaataaaaatttttctttttaggattcgaaataagcagttgaaaatcaattgtgttttaggaaacacagggtgttgtttgaaattaaatgcaaatcatctcccaaaatatttggagtgaatgaaaaatagtagtaatattgcatcctcaaaccggtcctatagctcagctggttagagcacctgactcataatcaggtggtccctggttcgagcccaggtgggaccacagaaattaaagcctttacagcaatgtagaggctttttttgtttttaaacatcgattgtgtatggaggatacgggtagggtgtagttaaaattaataaatgaagagtagaaaaagaagacaagggcagagtaaaataggatcaggttcaaaagttggggattaagcaaaaagattagataatctgaacaagaaaaaatctatattgctcactcctattggaacaaaaaatacattatgttttattttaatatagtgtctttctcaggtagtttggaaccacaagttgtaatcatgaaaaaagaaaagaagaaatggatcgtagttaaagtgattggcgattatgtttattactagtttatgggttaaatattgagtataaagcagtttttttcgttttgattaggtatatctcgacatggcttgggtaggcttcaaagaacgagaaagcttttttacgagaataactgcagaaggaaaaggagaactatatggtagtacttctcctgtaggaacaccatgtaaaaaataaaaataatggaacagtttaaaaaaatacttgtaacaatttattttttctttttcttatatgctaacgcgcaatatgttaaaagctctgagcctattaatgcatttttagcaactcaaaagatagataaggaaaagaaatatattttacaagctgataaggtttcaaataaacaagctttaagaatttttaatggtggtgaaggacctgatcatgttggggagccaaatgttcctatagattataaagacggtttgtttgtagaaaaacattggaaaaaaatgtatgaaaaatacgtgtctgatacaataaaaagatattggagaaaggaagattttcctgagtatgattttgtattagaaagtaaagatggtttatttggatcggcatttcacgataaatatatgaatagtaagatagaagatgttgtaatggtttccgaacctatgtattatatggatagaaaatatgtaatgttttattacaatgtggcatctttttttggcagtaatcagccagaagttgtcattatgaaaaaagaaaaagaaaagtggattgtagttaaagtgattggcgattatgtttattactagtttatagtttaaatattgaatttaaaactagtcgtttcttcagttcttattaaacaggtctatctcgacatgacttggggaggacttcaaggaactcaagtatttaataaaaattatcctcatgatcctaacgataaaaaaattaaagatcgagaaaggattttagctagaattaataccgaaaaattgggatctcaatatggtgtagtttcttctgtaggtacatcttgtaaaaagtaaaactatgaaacaattaaaaaaaatatttgcagtaattcccttttttattttatcctgtaccggtacacaatatgtaaaaagttatgaaccgattaatgtgttcctggaaaaagaaataatagaaaaaggaggaaaatatattttgcaaacagacaaagcatctaatgcgatagtactacgtatttttaatgggagtgaaggatctgagcatatagaagaccctcattattatattaacgatggtttgtttgtagaaaaacattggaaaagaatgtataaaaggtatgtcaatgatacgattaagaaatactggaagaaagaagatttcccgaaatatgattttatcttagagaatagtagagactggcccaagcttccttataagagtgctaaatatttagactatgaagttatgataatttctgaacctatgtattatagaaataaaagatatattatgttttatttaagcacatcatatttcagtagtggctctagcccgcaagtcgtagttatgaaaaaagaaaaaggaaaatggattgttgatagaacaatgtgggaagaggttttttattgataaatagattggaactagaagatttccaaagcatttcccggctgactctcaggtgtatctggatttggctttggaaggacttcaaaaaacgaatatattcctataaagaacgggaaagaattttcgcgagaataactgcagaaagaagaggagaactatatggcagcacttctcctgcaggaacaccatgtaaaaaataaaaataatggaacagtttaaaaaaatactcatattatctatttctttttttattttatcgtgtgtcagtacaaagtatgtagatagttatgagtcggtaaatgtatttttgaaaacacagaagttaggcaaaaaaaaatatattttgcaaagtgataaagggaggaataaacaagcattaaggatttttaaccgtggagaaggggcagctcatattatagattcttcagatccggttgactatactgatgatttatttgtcgaaaaacactggagaaaaatgtatagaaaatatgcaaatgatacaataaagaaatattggaaaaaggaagatttccctgggcataatttttttttagaaaagggcactggtttaacgttaaaatatgatatagggattaaatatatgaacagtggaattgaagatgttatagtaatctcagaacccatgtattattggaacaaaaaatacattatgttttattttaatatagtgtctttctcaggtagtttggaaccacaagttgtaattatgaaaaaggaaaaagggaaatggattgtagttaaagtgattggggattatgtttattactagtttatattgagattctgtgtaagcacttttttttgtttaaataagatatatgataacagaagttttaaaaagaatgcctatttgtattatcctagcaatatatatctggacttcaatagcaatataaaccgaaatgttctaacagaatgtttcggtttttttttattgttatatattgagtgtgagtagagggctttgttatttggatttttggtttttttgtgaggaattttggttaaaagtttgtagtattaagaatattacagttaatttgttgaaattatattccaaaattcaaacaaaacccacttaggactgatgaataaatactttagtaatctagcattccatctttatgtttaagctgttgaaaagaaagcccagagcttattctaagattgaaaatcatattttcggaataataacagagcttttaaaattgagcagtaccgaaatcaatggggatgaattaggggggaagtattatttaagtaacgaagagcagcattttaaagtgacggtcttaggtaatgattatgtaatcaggttaaccaatacaagagattctgttgctgaaaagtatgataaagcttttgtggatgacgttttgaaggcaataaaagaagagaagcatcgcagaatggaagaggtttatgattctataaccaataacatagaaaaaatggctgagcgactgcacaacacacttagagaatctaatgagcaggaaaatcaaaaagtccgaaaactggaaaccaaagatcgcgaaagtaaaaaggtaaattagaaccttcttttttctggttttagatcatttaaatgtgaagactttatttttgcagaatcatttcttcgtaagtcaggatggtttcgtatccttttgaagtaaaataagatctgggatcttctttggagattgtcatcacaaaatctccaccccaggcaccaaggctttttacaactccattgaaatccggaaaagcggcttctttgacggtttgcatttctagaatatcactcaaatgaacctcgtgtttttcagcggcaagagcaaattcttttgctgttttagcgttgataagagcggaggtaattttgttgttttcggctatattttgcgctaaattctgatttttattgttgtaataggcttttatggctgctttactattctgttttttattgagatacacaaaatgaattttatctgtaaaatccgggttaaaagagatcggttttacagcattattgtcaatttgatagagtattggcgtgtcattttgtgcacaggcaatgtcataaccactgccaccaaagctgttttttaataaagtaaaggcattgactctggtccattgtgcaacattgttcaataaagttgacgaagtacctaatccccagtttttaggaaatgtaagatgtgtgctgatcttgtaaccgtcagtatcttttaggaaatccgggttcagaagataagcttcatgaagaatttgaatcaaagtcgtttttacagtctcgatttctgactttggattgtcgatgatctctgaaaaaggaatcgaattctcaaaccatagctgtccgtcaaaatcataacttttccaggtgatttcctggtttgtgccattttcaactaccagattctggccaaatttggtaggtaaggcaaaagcgtcagctccgtctaaaacaaggtattctccggaaataagcaattttccgttactgtaaaaagttgttttcattcttcaattataaattaaattccaatccccaaacgtcgttataaattccaaataccaattaaccttggaacttggaatttgaagtttggaatttaaaatttttacttttttcttagattttcaataaactccaccacagcgctatgtgatacggcacttttcttgaaatgagttttaatcaaatgacgttcttcttcagttgcttcaaattgattgataatattgttcaggtgcatcttcatgtgtccctcctgaattccggtggtagttaaggaacgtaaggcagcaaagttttgtgcgagaccggcaactgcaacgatttccattaattcttttgcagaaggtttttcaagaatatcaaaacatagttttaccagtggatgcaaagaagtcaatccgcctacagttcccagtgctaagggaatttcaagccagaaggtgaaaattccgtcttcaattttagcatgagataaacttgaatattgaccgtttttagaagcataagcgtgaactccggcttcgactgctctaaaatcatttccggtggccagaattacagcgtcaataccgttcataattcctttattgtgagtaacagctctgaagggttctacttcggcgatttgaaccgcctgtacaaaacgctcggcaaactcctgcggattcggaatgtgtttttctgttaaatcttcgatagggcaggaaacttctgctctaacaatacaatttggtacataattagacaaaatactcataattacttttagagtctcatcttccgaaaacagatcagaatgttgaaattcatcttttaaggtagtagcaaattgctccagacaggagttgatgaaattagctcccatgctgtctttggtttcaaaagtagcgtgaagctgaaaataattttccagaagacttcttttgtcttttagttttatgtctaaaattccgccaccgcgttgttgcatatttttagttatgctttgtgtgtcagtaaataatgtaggtttaatctgattgaaaaaagattgcagtttttcagcatctccgttgaaggtaaaatggacctgacctattttttcggtagccataaccgttgctttaaaaccgcctctggtcgaccaatattttgctgcttttgatgctgcggctactaccgaactttcctcaattgccatcggaattgtggtatattttccgttgattaggaaatttggcgctactcctaacgggatgtaaaggtttgtaatggtgttttcgatgaattcatcgtgcaattgctgtagcttttcgtctgtattccagtaatttcttataatagaaagggcttcttcagggcttgaaaaataggtattggcaatccagtttattttttcttttttggataatttcgaaaatccggcaacggcgttgttcattctcagtattttaaataataaagttgcggcaaagatactattttaagacttttgtttgcaatgtatttgaaaattgaaaactacgcaatcgttatttttttttacatttaacaattaaaaagggtattatgttcattttttttattaaaattgggctctttttttatatttaaaataattctaatgaatacaggtaaaattactgttatatttttatttttagtggccactatttttggtcagcaaaaaattactgtcgagaatatttatagcggagcatttcgggcaaaaggaatggatgaactgcaatcgttaaaaaatacagaccaatatacggtactaaatgtagatcaggccagccgaagcatgcagattgatttgtacgattttgcaacactaaaaaaagtagccaatttaatcgatacaaagaatcatgcagctcttactgaaggaattgacagttatacttttgatgcctcagagaaaaagattttaattgcctgtaatagcaaacaaattttccgtcactcgtttacagcagattacttcttatacgatatcaccacaagaacgttgagtaaattatttgattttcagattcaggagccaactttctctcccgacggaactaaaatcgcatatgcaaaagagaataacttatatgtgtatgatttggcttcgaaaaaatcaacggctgttactactgatggaaagaaaaatgctgtcatcaatggtatcacggactgggtttatgaagaagagttctcctttgttcgtgcttttgactggagtaaagacagtaaaaaattagcttacatccgttttgatgaaagcgctgttccggaattctcgatgtcaatctttcaaaaagatttgtatccaacgattgaaacgtttaagtatcctaaggcaggagaaaaaaactcaatagtatctttacacatttatgatgcggtgagtaatgcgggtaaaaaagttgatttaggaaactataatgacttttatattgcaagattacaatggacaaatgataacaatgtattatctgctcaggttttaaaccgtcatcaggacaatctggatttactgtttgtggacggaactaccgctgcaacaaaagtggttttgaatgaaaaagacaaagcttatgtggatgttaccgacaatttgaccttcttaaaagacaatagctttatctggacaagcgaaaaagacgggtttaatcatatttacttatatgataaaaacggaaaacttaagaatcaggttacaaaaggaaactgggaagtagtgtcttactacggtttcgatgaaaaaaataaaacaattttctatcagtctacagaaaatggttcaatcaacagagatatttatcgtattgctttagacggaaagaataaaattcgtttgtctaaaaatactggaacaagtgcggcaacttttagtccaaactttcagttttttatcaatactttctcaagcagtactcagcctaccacttatactttgaatgaggcgaaaacaggaaaagaaatccaggttatcgaaaacaatcaggcgctttctgctaaattaacagcttacaatttaccgacaaaagaattttttgttttaaaaacagctaaaggcaatgagcttaatgcgtggattttaaaaccgaaagactttgatccttcaaaaaaatatccggttttcatgtaccagtattctgggcctggttctcagcaggtaaacaacgattggaacaattcagacgactattggtttgcatccctaacacagcaaggttatattgtggcttgtgttgacggtagaggaaccggttttaaaggggcagatttcaaaaaagttactcaaaaagaattaggaaaatacgaagtagaagatcagattgacgccgcaaaagtaattggagcatatccgtatgtggatgcttcaagaattggaatcttcggttggagttatggcggatttatggcttcaaactgtatcttccagggtaatgatgtttttaaaatggcaattgcagttgctccggtaaccaactggcgtttttatgacagcgtttacacggaaagatacatgcagactccgcaggaaaatgcaagcgggtacgatcagaactctccaataaatcacgttgacaaactaaaagggaagtttttactgattcacggatcagcagatgataatgtacacgtacaaaattcaatgcaaatgatggaagcattgattcaggccaataaacaatttgattctcaaatttatccggacaaaaatcatggtatttacggaggaaaaaccagaattcagctttacaacaaaatgactaacttcatcaaagaaaatttataattataaaacaaaactaaaaaccttaaataaataataaagaatatgggagaaactcaggtaaaaacagcgcatccaaaaggactttgggtattattcggaacggagatgtgggagcggttcaacttttatggaatgcgagctttattaactttatttctggtaaattcattgttgatgaaggaagaagaggcttctttgatttacggaggttttcttggactttgttatttaacaccaatgttgggaggttttgttgccgatcgtttcttaggaaatagaaattgtatcatcttgggagggttgcttatggcaatcggacaattgttgttgtttaccagtggaagtgtttttgaaggtaacagagcgtttgctactattattatgtacactgcattaggagttatcgtattcggtaacggattcttcaagccaaacatttcaagtatggtaggaagtttgtatcctaaacaggaaaagacaaaattggatagtgcttttactattttttatatgggtatcaatattggtgcttttttaggacagtctatttgccctttgttaggagatgttaaagatgccggtggagttagagatattcacgcttttagatgggggttccttgctgcttctgctgcaatgtttatcggaacaattcttttttacttcctgaaaaataaatacgtggtttctcctgaaggaaaaccattaggaggtttaccttctaaaaatgacgcctctgattttgaagaaggagaagctcagaaagctgatttctcaaataaagctttactagctgccggaatcgcttttgtcactttagggttctttttccattatgtggttggtcagaacttgatttatactttgatttattctagtggtttgtcattggcgggattaattatttcggatacttctttgactaaagtagagagagacaggattattgtaatttacatcgtttctttctttattattttcttctgggcagcttttgagcaggcaggttcgtcattgacttttattgcagacaaccaaacggatagaaatttcttcggatggcaaatgcctccgtcaatggttcagatttttaacggactattcgtagtattattagcagtgccgtttagcgtactttgggatactttaagagctaaaggtaaagagccaatttcaccggtaaaattagccgttggtttagtggtgatttcggttagtttcttcatgatcgctactcaggtttcttatatcggaacatcagggttgttattggtaaaatggcttattttattatatttcttaaatacatgtgctgaattatgtttgtctccaattggtttgtcattggtaggtaaactttctccaaaacgttttgcttcgttattgtacggagtattcttcttgtcaaatgcttcaggttatgctttaggaggaactttaggttcaatcttaccggcaaccggagataaatttgcaaaagcaaaagaattaggaattgaccttcaggcagttttagacaacaagattacaccaacagctgaacaattggctctgttggaaaaacatcagattagtgcacataaccacttctttgccggattcgaaattcataacttatacgaattcttcatggtatttgtggtcttaactggtattgctgcaattattttatttgctttgactccatttctgaaaagaatgatgcatggtgttagataacataaatcgtaatcatatataaaaaattacctacaggtttaggcttgtaggtaattttaattttaaagactttatagttatgtggaaaaaacacccaaaagcattgccattcctgtttctgtctgaaatgtgggaacgttttggttattatttaatgatcggaatttttactttatatctgaaagatgtaaagagcggttttgccatgaccgagaaagaggcttctgatttatacgggacctttattgctttggtttttctgactccgtttattggcggactaattgccgatcgatatttaggatatagaaaatcagtcattcttggcggaattttaatgggaatcggttacttcttaattggagtgcatgatttgaccatgctttatatcgccatgactttgataattgttgggaatggtttttttaaacccaatatttctacattattgggcagtttttattctaaagaagagtataaagataaaaaagatgaaggctacaatattttctatatgggaattaatgttggaggttttatctgtaatttctttggagctgctttgcaaatccttttgggatggcattgggcttttatggctgccggtgtcggaatgtttataggtgttattgtgtttttgttaggtacgaagcattatgtggggcacgaccagaaaaaaggagtacaggaaggtgatatgcctttttataaaattatactgtttattttattgccctcttttgtttttggagcaattggctggttgataaaaggagtagcttcagatgctaatgtgaatagttctatatttggttcagacagtacagacgcttttatttttgcatgtattccaatagtactcttttatggatcactttattttaaagcaaaaacagaagataagcgatcaataggagccttattggctatttttggagtagtgattttattttgggcagtctttaaacttaatggctcggcacttactacctgggcagaccgatatactgacagagaagtaaccggaacatccggtaaggtgattgctaagcttaaactggcaaaagaagttgagtataaaagggactctactgaactatacgatgatcagtttcgtttgcaaaaggtaaatggagtggttaagaaagaagtcaattatcctttatattttagaaatgttgctccggataaattaccggcagaaggtgctaaggttcatctttgggcgacaaatttaagtcagtctatcaacccggcctgggtggttatattaactcctttgatcgttgcattcttctcttttttacgaatgcgtaaaaaggaaccttcaacacctactaagattgctttcggtttgctgatttcggcgctgtctgttttggttatgatagctgctgtaaaaattgggaataacggagcagagaaagtcagtgcctggtggttagtcgcgaattatggtatcataacaattggtgaattgtttttgagtcccatgggattatcagtagtttccaagttaagtcccgttaatatcacttccttaatgatgggaggctggttcctgtcgacttctataggaaataaattaagtggagttttagccagtatgtgggatacttacgataataaagtcaactttttttgggtaaattttgcgctgttaatgtttgcgacaatattgatgtttgctttagtaaagcaacttaacaaagtgatgaaagagagaggaattaattaattatttataaataaatggagcaaaaaatcactttagaagaaattcaaaattttaaaggcaattatccgaaacaattatggtatttgttttttgtcgaaatgtgggagcgtttttgcttttacggaatgcgtggggttttggttatttttatggtcgatcagcttttcttgaaagaagatcatgccagcgagcaatatggtgctattcaggcttttgtatatgcctttacttttattggaggtatttttgccgataaagtattaggatttaaaaaatcgttgttttttggaggaatcgtcatgattctggggaaccttttgattgctattgcgcctcatgatttcttttattacggaattgctttttctattattgggacaggtttttttaagcccaatgtttcttcaatggtcggagaattgtatcgtgaagatgatggtcgaagagatgcaggttatgggatgttttatgccggtataaatgttggcggactttttggtggtgctttgtgtgtgtatttagggaagttttattcttggcaattgtgctttttatccgctgcaattgtaatgtttttagggttgatcacctttttatttactaaaaaatatttaggaccaattggtgattctccgttattgaatttaacaccgcaaaagagacgaattcgtgagatagccgtatatgttgtgtctattttgagtttgccttttatttttataatggttaagaatacgaagtatacggattattttatgtatactattggtacagttgctgttttgtactttgcttatgaattgtttaaactgggagattctaaattgcaaaagaagctttttgctgcttttctgtttgtatttttctatttcctgttcaattctatttacgaacaaagtggtggatcgttatcgctttttgcaaaagataatttgaataataaattgttgttttttacaattgatcccaacgttgtgaacaacagttcgaatactttttttgtagtagttttaagcccgcttattggtttgttgtggatatggttagggaaacggaaaattgaaccgaatactttaattaaattcggaattgggtttttattcctggcagcttctttttacatcttctatctgaccaaattctttgccgatgctaacggaattgcttcattgaatgtctttacgtttgcttatctgataaccactatcggagagctttgtttaggaccaatcggaatgtcaatcattaccaaattatctccaaaaagattattcggaatgatgatggggttgtggttcctggcaagtgcttttggacagttggctgcgggtaaactgggagccgagatttccagatcaaataccggcgacaccttgatttctaaattgcaatcgtatacagaaggttactatcaactggctatttattcgctagttgcgggcttgatattattagcaatttcgccaattattagaaaattaatgcaagaagtaaaatagacgacattttacgattctttttttgtttaaatttgtgtgtaaaataaaaggatatgaaaaaaatatttttaataacgctttttttagcgggagcatttgtaacgcaggcacaagagttaaaatggtatacggatgttaaagaagcgatcactgttagtaataaagagaaaaaacctctgttaatgttttttaccggaagtgactggtgtgggtggtgtattcgtttgcagaatgaggttttaaaaacggctgaattcaaaaaatgggctaccgaaaatgtggtgttggttgagcttgattatccaagaagaacacctcagacaccggagcttaaaaatcagaataatgaattacagcaggcatttggaattcagggattcccgactatttatttcacaagcgctgagtcaaaagacgggaaagtgaattttaaaggattggggcagacaggatatgttgccggtggtccgaccgcctggttaacagttgctgagggaattgtacatcctaaaaaatcgtaaagaaaacattaaattacaattatagttcaaaaaaactccttgccttttggtaaggagtttttttgtttcgtaagaaaaagtaataagtaaacccgtgcttattgtgtattttgtaatttattttggttaaaaaaacacataatatattttttgtattaataaaaattggaaaattaaaatattatgttaatttcgtcttaatattctaaccaaaaaccaatttaatatgaccaaaaaaatacttatcctactgttttttttaggttcaatttttatgcaggcgcagaatttagtttggaaaacaaatatgacggatgctattgcgcttagtaatgaacagaaaaaaccaatgttaattttattcactgcctcaggtgtaccggaaaatcttcagaatgaaatttttaaaactccagactttgcggtttggtcccgtgacaacgttattcttgtaaaacttgatttgtctgacagtacagctgatgaaagtgatagagaacaaaagctcaaattgaaaagtgcttttggagtggaggacttgcctgaagtttgttttgcaagtgcttcgattagaaaaaataaaaccacatttagcgctttaggaaaaattgcgtataaaccgggtggtgcaaaagcctggattgcggagtcaaatgcaattttgcattcaagtgagtagtaagatttaaattaagtttcttagtttaatttgtagattccctttttgctcttgggcgagaagggattttttttgaaaggttgatccggataatcaatagttttgtcatttaaaagggtatttttttttattttcttaaaaatccaatactttattagtgaatttaaatttatgttacttttttaacttattttatttggtttttacttgtttggtgaagatattgtgttaatttagtcgcattaacctgcttaaaaaaccaatttagtatgaaccgaaaactacttattttattactttttttaggttcgtttggcctgcattcgcaaaatttgatttggaagacagatatgaatgatgctataatggcgagtgattcacaaaaacggcccttattaatttttttcactgctgccggagtttcgcagagattccagagtgaaatttttgttacacctgattttgcagtatggtcacgtgataatgtcattttggtaaaactggatatgtcagatacagaagcatctgacatggtaaaagagcaaaatgtcaagttaaaaaacgctttaggtattcaggaacttccgcaagtatgtcttttaatggcttctgttcgaaaaggcaaaactacttttaataacttaggattggttccgtacaaacaaggcggggcgaaagcctggattgcagatgcaaatttaattttgaatccgtaagtcttgtagaacaggacgaactattctgtcttttcggactaagtttgattagtttaaagaataaaatcccttttcggctgtggcatgaaaagggatgttttttttacggcaactgcttttccagattttttgaatagagtaggaattcgatgcatctgcaattataattttaggatgcagctcttgcagaacacggtctaaattgattttcggggattgaattaacaataataggtcaggttgagagctgattttataaactccggaactgtcaattactaagatcttttttccattaaaatagagcaggtttttgatgctgacagtagcgcttaattgactaaaatcactcgacaaataagaacttagaagagttgcttttgaggattgaagtaaaagagtatcatttgaaaacactttgatacaacctccatttttctgagaaattatagagttgtttttagtatgataaacgatcatttcacgttgggttccggtttctcttttggtgtaaatcatagaaagctgaaacgctataactgaaatcaatacagcgaacgttgtagggtaattttttttcttgccccagattatggcagaaataattagaaagtaagaggagataagaagacagaagttaaagctaatgttttggataacaaaccacttgagcgatgcaatgtaatggatggtataatttaaaaggaaaatacttttttcaaatagctcagtgaggaccattggaggaggacaaaaaacagcaataagcaatactaggatcccggcaatcatgatgaaagataatatagggatcataacaatattggtaacgaaaaataatcccggaaactggtgaaaataatacaagcataaaggtaatgtgcctatttgggcagcaaaagaaacagttagtgcgttccaaaggaattttgagattttaagctttggagaccagatactgtttaagagaggttgtagccaaagaatgaaaaacaaagcaaaataacttaactgaaaaccaacatcaaacaaaaagtaaggctcgaagagcagaattaaaaacaaagagacaagtaaagtatgatacgtacttcctgttcttcttagatggctgccaatagcaagaaaagaaaacatgacaacagaacgaagtaccgacggagataatcctgagattacggcaaaaagtgcgagagacagcagtattgaaatcaattttaataaagagccctttcgtgtgttgggaacaggttttaaaataaaactaatgaacagcatgataaaaccaacatgaagaccggaaaccgacagaatatgtgtagctcctgagaactgataatcctgaatcaaatcatttgaaatttcttgtcgctgtcccaatataagagcaagtgcaacgttcatttccgtttgacgaaaacctgtttttttcagattattataaattctggagtgtaaacgtccgcagtaataccagatgtctttttgaagttttttattaaccgcgatttcttttttattgagatacaactgaccataaatctgtttatctgaaaggtatttttggtagtcaaactgatttgggtttttattcggactagtacgttgtaaaatggttttgacttttattatgtttccaataataattggattttcagcactgtccttttctatatttacaagaatttttccggagtaattcctattgttaattttctttacctgcacatagtagcggtcgctgtatgcgttgctttttagtttttcgcataccacaaaagttatcgtttgcggagagccaaaaacttctttacaatgactgtagttggattcttgcagcgattctgtatgaagtaaaagcgttgcaatgccaataaggaaagaaatgaaagagatgcttattccaaaatagatacttcgcttattgtttttttgaagagaagagtaaacaagtaaaaaagtaagaaaaccaagaacaaaaacagaagttgttaccgtgaattttgatggataataataagcagccaaaatgccacagctaaaccaaatggtaattttagttaaaggaaaatctaatactttcataagtcaaaagtattaaatttgtaagaaaaagaacatgtatgttgtttgattattctactaccctgttgatttgagcaaatgaattttgataatagggttctttagtggatgaaataataactccttttgaggtagaagaatggacaaatttgatctcatctgattttacttctacaatcagtccaacatgattaatctgtttgctcctgtttgttctgaagaaaattagatctcctttttgggcgtcattaaatttaataattcttcccaccttagcctgctcaaaagagtttcggggtagttttatattttccgactgaaaagtggtaaacactaatccggagcagtcatagccactttttgtggtgcctccggctttgtatcgcaccccaatattgtctgtagcgtgtttgattaaatgtgtaaccgtatagctgttttcccgctttgattctttgttgcccaccgcagttgaagccgatttacaggaagcaaaaaggacagtgatgagtattaaataatatattcttttcaaagcaagaagttttaaacgttttttaaatcagctacaataagctttgctgtttttttactggctccgacacctcccagtttttgctctaagatgtcataattctttaacaatttttcgcgataatcagaagtcagtaatttttgtaattcttctttaattcgtttcgtgttgcattcgctctgaattaattctgtaaccacttcttcatccatgattaaattgacaagtgaaatatattttagcgtgataatgcgcttggcaatttgataggaaatggcacttcctttgtagcagactacttcagggattttaaaaagagccgtttccaatgtcgcagttccggatgttaccaaagcagcggttgaagagcgtaacaaatcatacgttttgttcgatacaaatttgatgtttttattgctgatgaattgctgataaaactcaaaatcctgacttggagcaccggcaattacaaattcataatcctgaaaatcatccacaacgcttagcatcacactcagcatttttgtgatttcctgttgacgactcccgggtagcaccgcaataataggtttctctcccagttggttttcttttctgaaggttgtttcgtcaaaagagggctgattctgaatagcatcaatcagaggatgccctacaaaatctacaggaaaatgatgtttgtcttcgtaaaagcttttttcgaaaggtaaaatcacaaacattttgtcaatatcatttttgattgccttgatgcgattctctttccaggcccagatttgcggcgaaatataatagtgcgttttgtaatgtaacgctttggcccattttgcaatacgcatattaaaaccgggataatctataaaaatcaaaacatcaggttgaaatgctgtgatatcttttttgcaaattttaatattgtttaatatggtttttaaattgaaaagaacttcaacaaaccccatgaaagccagttcgcggtaatgttttaccagagttccgccggctttttgcattaaatcaccgccccaaaatctaatttcagcctgaggatcttcttcatataatgctttcattaaattagaaccatgtaaatctcctgacgcttcaccagctattatgtaatacttcatattgatttttttgaaagtgtgtttccaactttaaacgcaaaataatttttgcggtacaaagataagatttaaataaataaagttgaaatcgcaagaacaatgactgctaaaacaacgcctctggccatcaattcctggttcgtttttagaagaataccaaaaacggccaaatctaaaacggtaccgattgtgattacttttccgagatatccttgttgtttgatggtttgaattcccgtaaagaaatcaaatttggtaaaaaacgaaacaaacacaaaacttccaagcaaagccgtgaaaattccaataacaaagcctataataatgtcttttttagtcatttaatttccaggtattcagctgctgcatggtatgatgagcggtcagatcaaactgtaccggaacaattgaaatgtatccgttttctaaagcccattcatcggtatcctcgccctgatcttcgtttgtgaattttccggtaagccagtaataatctttcccgaatggagtttgtcttttgtcaaacttctgtgcatagtaggcttttgcctgacgacaaatttttattcctttaatttcttcttcttttaatttcggaaaatttacatttaaaactacaccagacggcaacttgttttccaaagtttctaaggtaatttttttaacgtacgacttgatttgctcaaaatcggcattccagtcaaaatccagtaaagaaaatccaattgcctgaatcccttctataccggcctctacggcagcactcatcgtaccggaataaatcacatttatagaagaatttgacccgtgattaatcccagaaacgcacaagtctggttttctttttaaaatttcattcacggccagtttaacacaatctacaggagttcctgagcagctatattccgttaccacatcttcttctttagaaattttgtcaagaaacaaagtattatttatggtaatggcatgacccatggcactctgaggtttatccggtgctactactacgacttcaccaatagtttccatcacactgattaaagctctgattccgggagctaaaatgccatcatcgttggtaactaatattaggggtttctcatttttcatgctaaaatcgtaaggttatatatgggaattaagcaaatgtagtgacagatttcggtagaatacgaacaaaaagaacaaaatttgtcaactaatttcaagaagatttttgcgcgtcaaacatttttatacctttaacaaaaaattatagcgggcttggctttgttggcacagtttttaccgtaacttagattaaaaaatttgatgaatgctattattaagtttatgaaaagaaattataaaatacttatagccgtattatgcttgtcattgacgttgtttgcctttaaaataaatgcagacaaatcagtagatccggatccgaatagagataaaacacttttagaattattagcatttgttattgaaaaaggacactacagcccggcagaaataaatgatgaattctctaaaggaatttttaaagattatatcgaagcattagatccttcgaagagattcttcctgcaatcggatattgacgaattcaaacaatatgaattgcaattggacgatcagtttttgaataaagacttaacgttcttcaatcttacctatacaagattgatgaaacgaatggaagaaagcaaaaaacgttataagaccattttagcacagcctttcaactacgatattgatgagacttttaatgcggattatgacaaattgccgtatgctaaaaatacagcagagattaacgaaagatggagaaaacagatcaagttatcgacactttcttcacttgttaccaaacaaaaattagaagaggataaaaagaaaacagaccctaattataaggagaaaacttttgaaactttggaaaaagaaacgcgtgaaagctcattgaaatctttagatgacaattttagtctgattaaagatttgaataaagaagattggttctccgtatatgtaaattcaatcatgactcgttttgatccccataccagctattttgcacctgaagataaagatcgtttcgatgttaatatcagtggaaaactggaaggtattggtgcaagactgactaagaaaaatgattttactcaaattgatgagttaatttcaggaggtccggcatggaaaggaaaacaacttgaagcaggagatttaattctaaaagttgcccaaggaaacgaagagcctgtagatgttgtgggaatgcgtttggacgatgttgtgaaaaaaatcaaagggcacaaaggaacagaagttaaacttaccgttaaaaaagtagacggtacaattaaaatcatttcaatcatcagagatgtagttgaaatcgaagaaacatacgcaaaatccagtattgtagaaagaaacggattgaagtacggagtaatttacctgcctaaattttatatcgattttgagaacaaagacggtcgtgatgctggaaaagatattgctcttgaagtagaaagacttaaaaaagaagatataaacggtatcgtacttgatgtgcgtgacgatggaggaggatctttgtcgactgttgttgatattgccggtttatttatcgaagaaggaccaattgttcaggtgaaatctgcagggaaaaagaaagaagtactgtacgataaagataaaaaagtggagtgggacggaccattagtaattatggtaaacagtttctctgcttcggcttcagagattttggcagcagcaattcaggattacaaacgaggggttatcattggtagtaaacaaacctacggaaaaggaacagttcagaatgttctggatttgaatcaatttgttcgtaatgcaaattatggcgatttaggtgctttgaagattacaggacaaaagttctatagaattaacggaggttctactcagttagaaggagttcatagtgatgtggtaatgccggatcgttatgcctacttaaaaatgggagagcgtgatattgataatgctatgccttgggacaaaattgatccggcggattatagcacatggcattcgaatacaaattttactaaagcaattgaaagcagtaaaaacagaattgctcaaaatgcacagtttaaattgatcgaagacaatgcgaaatggattgatgttaagaataaggagaatacttatagtttaaatatcaaaagctttaaagctactcaggaacaggtagaaactgaaggtaaaaaatacaaaccaatttcagattacaaaaacaatttggtttttaaatcattgccttacgaagagcttgaaatgaaaagtgatgctacgttaaaagaaaaaagagaggcttggcatcaggcattgtctaaagatgtttatgtagaagaagcattgaatgttttagatgatttgcaagtaaaaggtgtggtaagaaacagcgccacaactaagatcaaaagagataaattagtaaagtcttaatactgtaaaaggattaatttgttaggaaaacgctccaaaatgtattttttggagcgttttttgtagatttaacggtactctacagatgttggaaaccagataaaaatatatttgactgaaaaaatgaaaaattatatccttttgagtttattgggatttgcgctgttatcctgtaaaaaagaaattaatgaaagtgtaaaactgcccgaacaggagaagcagactccatttgtttcgaatcaaagcagttccgattccgtatttacagtggcatatttgccgacttctacgacccgacaaattgtaaaacataactattacacattgtcctacaatgaaaaatttgaacaggcagaatgggttgcttatgaattaaagaaagaatatcttaaaaatgccgactataagcgcccttattttattgaagatccaaaagtaacgaccggttcggcagattggaggaattataaaaagtcgggttatgataaggggcatctttgtcctgcgggagatatggagtttaatgagagtgcttacaatgatactttttacacttcaaatatttcaccacaagatcacgatttcaacagcggaatttggaacagactggagcagaaaacacgttattgggctgaaaagtatcatgacatttatgtagtgacaggaggaattctgaaagattcggataaaaaaataggaacagaaaaagtatctgttcctaggtatttttataaaattatcctggtcaaaaccggaaaggaacataaggctattgcttttttagttccgaacaaggatagtgataagtcgctttatgattttgtggttccaattgagactcttgagaaaatgaccggaattgatttctttcccaatttaaagaatctaaaaagtagtaaagatttctagagtgacaaacattagagacggcttttaggttttccgggattaaaaaggataaaactcaaaaaagctaaaatccagacgccgaatcctccataaagtaagaccatttcgaaaccatgggcaagagccaggtgcagaatcgatgaagctgagtctgttatttttaattgtggatattgttgattaagagaagaaaagtttcctattgctgctttttcggctatagcatacagcgtttttctgtctatggttcctgataaagaagtatttagataatagaaaattccgttcaccagaataaaagccattaaggcaatattaatagctaaagtgatcaatcgggcactcatgtctattcctgatgccataccggagcggtttgcagaaacggagcctgtggtggtattcgtgacaggcgtattggtcagtcctaatccaataccggccagtaaagaacctggaagcatcgttagccagctggcattttctatactacagccatacttcataagtataaaacctaatccgattacaaacaaacctaacggaattacaatgcctgaacggtagcgcgctgataggtattctgcaaaaggaggaatgaccaaagtgggcagtgtataggcaagtaaggaaagcccaacggctacaacatcatagtggagataactttgaaaatagatgggcaaataaatgatgaagggccaaaagctgaaattcataccgatagaccccaagatagcaccggaaaagtcacgtatcttgaatactgagaggtcaaacatcggatagggatttgttttttcgacaccaataaatagcataaaactaagtgccgtcactcctaaaagacaaagagccgtagggcttgtaaacccaagatccggtccctgcgtaatataatacgttagcccaaacacggctatggacaatgtaatcatgccccaaatatctattttttttgagttggtatctttagattcattaacgtagccgtaaataagaatcgcagtaagaattgctattggaaaatgtaccaggaacacccatttccatgatagtagcgccaggattgctccgcctattatggggccaaaacctaatccgataccgagaataattccccaggcaccgaaagctctgcttcgttcttttccttcctgaaattggtaggataaagcggctacctgacaaatcaacatggcacccccgcttattccctgaaaaaatcggcttataactagtaaaactacattttgtgccaaaccgcagattaaagacgaaactccaaataaaatggttgtaatgataagaacctgttttcttccgtatcggtctgccagtgttccggcagccattaaaacggtagtgcagcctatggtgtaaatgttcataatccattgcatgtctttaaggcttgcattcagtactttttcaagtgttggaaggatgactggtacacttgaaatttcaagtgaaaacattaaattggcaagacagatggcaattagagcgatattgtttttgccggagttaaatttttggttcattttttttatttaatttttagtaaaaataaactgattagggttattttttcagtacaattaaaggttaaagaagtatttttgcaacatgagaaaagaaaacttgcatcaattagttgaagtgatttataaaagagctgatcaatgcccattggtaaattcacaacttagtttttttcaaatggtatatgttatttcgggttcaggacttcttcatattaatggaaatgcaatttcttatcaaaccggaaatcttatgctattgacaccaaatgattgctattcatttgatattgttaacacaacagagtttttgttagtgaagttgaatagtgaatatgctaaagaatataaatcaaaaagtatcgatcacgtcgaatgtttatttcattatgcatcacatttgtcaggttgtattttgagccgaaaagcagatgaataccttgttaaatcaatagcggaatcattattacatacgatggacaataaagatatttacgatgaagatttaattattcactacgtaaacgcacttattgttattgctgcccggaacattgcgaaaataaaaccctcaggtgtaaaggagagtgctgataaaagggttttggaaattatcaattacattcagacgaatattttttatccacaaaaactaaaagtgttggtaatggccaagaagtttgatatatcagatacttatttggggagctattttaaaaatcatagtggagaaacgattcagtcttttgtttcaaattataagatccgattgattgagcatcggctaagttttagtgatatgagaattaatgaaattgtggatgagtttggtttttccgatgaaagtcatcttaataagttttttaagaaacatagaaatgttagtctgactgcatacagaaaggctaaggtttcagtgaattaatttttctaacgaaaaaaatatctttaaaaaggggtattaaaaaagccgaagaaaatctccggcttgtatttttttatttcttgcagaccttaaaaagtagtcaaagtttttaattcagcaatagtctgagttgggttttcggctttaaaaacaaagcttccggcaaccagaacatcagcaccggcttctactaattgtttggcatttttactggtcacaccaccatcaatttcaataatggtcgaagcatttttacgagtaattaaggcttttagcttctctactttagtataagtgttttcgatgaacgactgacctccaaaaccaggatttacgctcataatgcatactaaatcaatatcgttgattacatcttctaataaatcaatattagtgtgagggttaattgcaactcctgctttcattccttcagctttgatggcttgcaatgttctgtgtaagtgtgtgcaggcttcataatgtacgcttaggatattggcccctaaatcggcaaaagttttaatgtaacgatccggatcaacaatcatcaggtgtacgtctatcgtttttttagcatgtctcgaaatagcttctaaaaccggcattccgaaagaaatattcggaacaaaaactccgtccataatatcaatatgaaaccagtcggcctgactgttgttgatcatttcgatatcacgttgcaaattagcaaaatcagctgccagaacagaaggagcaataagtgtattcttcattgtgtagttgtgtgttgtgttgttttttttgcaaagttaatttttttaatcgcaaagctcgcaaagatttatgcaaagtttttatgttttgagttgagtaataaattcagaaagcggtgtgcttttaaaagtctgatctttaaaaagtgttgcagaaaaaaaataaaataaaaaactccggtaatcagccggagtttcaatcatcaatcaaaaaacgaacagtcaatcaaactgttgtttgctttgtcgtccaatataggtagttttgaaataaattccaaattccgacaaaataatcggaatttggaattgctataattggaactttggaatttatccaagataagttttaagaattttacttcttgaagtatgttttaatctacggattgctttttctttaatctgacgaacacgctcacgagttaagtcgaaagtttctccaatttcttctaaagtcattggatgttgatcgccaagaccaaaatacaaacgaacaacatcagcctctcttggagttaatgtctctagtgaacgctcaatttcagtacgtaatgattcgtgaattaattctctgtccgggtttggagattctcctgaacgtaaaacgtcataaaggttagaatcttcaccttcaacaagaggtgcatccattgataggtgacgaccagagtttttcatagactcttttacgtcatttacagtcatgtcaagttcttttgcaatttcttcagcagaaggcggacgctcgttagattgctctaataaagcatacattttgttgattttattgatagaaccgattttgtttaatggtaaacgaacaatacgagattgttctgccaaagcctgcaggatcgattgacgaatccaccatacagcataagagatgaatttgaaaccacgagtctcatcaaaacgctgagcggctttaattaaacctaagtttccttcattaattaagtcaggaagagttaatccttgattttgatattgtttagcaaccgatacaacgaaacgtaggttagcttttgttaatttttctaatgctctttgatcaccggcttttattctttgtgctaattctacctcttcatcggcggtaattaggtcaacttttccaatttcttgtaggtatttgtctaatgatgcagtttcacgattggttacctgcttggtgattttaagttgtctcatgttttttgtctcctcaatttttaagtgtacaaatggttatacgtaatgagttcaaaaaaggttacaattaatttaaattatttttacaaattaattgtttggctgttttttttatcttttccgatctaatttgaaagcacttctttaacctcgatagtctcttttataaaaacgggttttcctgaagcagaaaatccttccagtgtgatttcaaatttaccggatacgtctgaggtataaaattgtattttcgaatttgcatcacttaaatctactttaggaacccaaagaagctgatgtctgtaatcaggaattctttcatttttagtgctggtataatcaggtttaaaatagtcttttttagactgtggtcttagaagttcaggtcttaaaataaaactgcctttaagtttggtttcgtaatcgccatttttagttgtaaacgacactaaaccgttaaaagattttgcgccgtaattgtaaattccttttacaacattgattttatagatgtttttcgggttgtattggaacagttcgtttaggtcttctatgatcagtccgtctacgattattaaggtaggtagggcagattcgtaattaggatcgtagtcgtaaacatgaatggcatagttgtttttatcttttgaaaaatagacgcctttcacaacttcagttatcgtttcttccatagttgcgaatcgtgtaaaagcgtccagtttaaactcttttgataaatttttgtaaaaaggaatggtatcctttgaggctaatatgctgtcttttttaagattgtaataagcgttttctatttgagtagaaatcagtctttctgaaatattctgtttaaagtctgaattgaactgaaattccggaaagcttaaatttgaaaaattgatatttttcggtttgtccatttcaatagtataatcctgtttgttgtcttccagaatttgaacaattacattggagtttgagttcggcttttccagattaaaaataaaatttccttcattatctgttttggcaagcttcaatgtataatttttgcccactattgaaagagctacttttttattttttatgtcagcattgctggattgtatttttccggaaattagctcaccacgtaattccggcaatagaaaattagggttttttatttctgtttgaaggattttagaagtattgcctccaccaagttctccgaaattgattttcgtttgagctacaaaaccatctgcttttcttactgaaagcacataatttccctttgtaaattcatcagaattactgatgatttgcaactctgcctgatctctgtttttgtaagttttgcgtcttaaattaaaagagatgtctttgtttgttatcgtttcgggtaaagttacttctttttgagaaacggtatttacaggtttatccttgtaaggatttaggatataaatgtcaatattgcaataatctgagacctctttgttcaacatccagttggtgtatcctataattttatagtttccggtttccagagttgttggaatgaaaaagtcgctgctggcggttccgttttcgagaaacaatttatgggtaagaactgttgttttgtttttgtcgaccagctgcaagtaagcaattttgctatatttcgacatttcatttgttgatttattgacacagaaaatcttgtagaacaaagattctccggtgatataggaattagcgtttgtactgatgtaaatggattccttaaggttttgatctattgtattcagttccgttacggcattgttcttctgagcaaacaaaatttgctgaaagctcattgctatagctatgatggttatgtattttagtctatccaaaatgatggttttatgtttgatgaaaatgaagtgcaatctccgcattctacgggatacaatagatactgaggcgtttcgttaggaaaataaactttaattcctgatttgattaggtctaggatatcattcccctgacattcggctgaagaactgaaacaataattaaagtaaaattggtctatttcattttcaggaactggagagggacaatcatattgatatttaggtattggttcttttgggaaaagatcggtaaaattaaaaaagagtcttttttcggaataggaggacacattaaagaatccaatcactttttcgcctggattgtcaacaggatttatgtttccataaaaaaagccgggttgggtttgtgatagaatgctcccaatgtcagaaatctcttttagggtttcgtaaaaagtatgggcagcaagattctgaacatattgtttgactaatatgctgtatctgcttctgatgatcgggtctttgctgctaatgaatttaattggaaaatcagtaactctgtcttcacttaactggttcgtattggttagaattaattcattagattttttatcggaataacaaattctaacttctgttgtcctgtcttcaaatacaatttgtccttttggattggagcctggaggaaaaaagacagcaacggcttttttagaataaactttaggtgcaattattttatacgtttcgtcgtattcgtatctgtagtatcgggatttgtttgtgggatcgttgctgtttacagtaatttcaactcctaatacacctttttttgttactgcttttgcttctactttatcgatctgagtctgttgtggcaatttctcttcattcgagacgtagcttcttccgttttttgtaaggatatgcaattgataggctctaccgggactggcctgaaattggtttacggaaatataggcctcatttttttcctgaaaatcgtatttattacccagatcatcggtaacatataccaccgctttactttcaaaggttggtttctttccgtcaagtttatacgttctggacaatttaatttgatggtttttatattgatcagtgatagtggcttctattaccagagcatcttcgaagccattggtttggtacgaatagggtgtagtgcatcccaatacaattgaaagaagtatcgttataagaaatccgtagtgtaagatctttttcataatttctaaaatttaaaattataggtaattgttggtatcggaacagagaaaatagaggtttggtaggcttttacctggccttcttttgttacgaaaaagatagaataagggttattacgtcccaatacattgtaaatggagatgttccagaaactgtgggctaatttttttattttgtgattgccttcaatattcaatccgatgtctaatctataatagtccggtattctgtatttgttacgatcgctatacagtgtgtattctgcaccattataattgtactttccgattggataagttataggtcttcccgtttggtatacgaaattggaagaaaaactatagcggtgtgtaaatttgtaattcatgacaatacttacatcatgcggcttatcgaaattagttggaaagtaagtgctattattcaccttttcatcgttaaacttgctgtccagttttataaaggttctggaataagtgtacccaagccagccattaagtcttccggttgatttttttagtaaaaactctacaccgtaagcctttccattaccttgaagtaattccgtttcaagatccttgtttaaaagtaagttggctccaactttgtaatcgagtatatttttagaagttttgtagtatccttccaggcttaactcaatatctttataatccagttttttgaaaatcccaagagaatactgtaatccgctttgcggttttacatttaagtcagatagcttccaggtgtctgtaggcgattgggttgtgttgttggttaacaaatggatgtattggtagtttttatcgaaaccggcttttacaaatagactttcatcaattatatagcgcaaagcaagccttggttcaaaacctccataagtcgtaattactttattattgccatacgttttttcttctacaactgttgaaggagtctttggggcatcttctttgtaaattttctgcgtagctgctcctaaagccgcgtagaaggaatatcgtgctccgatatctaataatagtttctccgtaattttaaatttatcagagaaaaacaatgccgattccagtcccttttcgtcatccacttttataggtgtcactatcgaagtttccccatttggattaagttccccgggattaacgccgtataatttacttgatattccgtaagtaaatttatgtttactgttcaattcgctattgaatttaagactcgcctgagtttcagttattttatatttgaaaataaaggattcaggattgacagattgataatcaatactgaatttgtactcgctattggagacattaaattcactgttgtttttctcattaaaagcatgtttccattttaaagaaatcaaacggttgctgtattggtacaacgagtcgggagtaatagtgtatttgtctttactgtaatatgcggtaccttcaatagtattgttttggtttattttatgactgtattttgcaaacaaatcataaaaagaggcctgactgtttttgaggttttcatcgtctaagctttttaaaatccaatcagaataagtggctcttcctcccaatagtaagcttgcttttccttttacaacgggaattgaagcggtcaggttactcgtaaccggaccaattcctccttcgcccgaaaatttctctgtgtttccgtttttagaagtaatgtcaaaaaccgatgacaatctgccgccgaattctgacgggatacctcctttgtaaatatcaactttattgatggtgtaagggtttaaggaagagaaaaaaccaaaaagatgagcagggttgtatatcgttccgttgtccagtaacattaggttttgatcttcttttcctcctcttacattaaatcctgaagagccttctcctgcagtttttattccgggaatggtgagggcaatttttaagacgtctctttctcccagaaccagaggaacggtttttacaccctcagcttcaattgtcgtaactcctgttatggcagttcttatattttgactgttttttccttttaccaaaacttcttttaattgatttattttttcaattatcggaaaatccaaagtaccatcactgtaaatcattattttacgggcggtattattgtacaataacgattcgatttcgattgttgccaatccaacaggtagttttagactgtaaaatccctgagcatttgtaacggttgttgcggtggtattttttgcttttaccgttatgtcagcaagaggtttaccgtctttttggtccgttatataacctgaaatggtgtaaaagtcagtttcagaatcgatggtttcctttccaattagtgcaataggagcggtctgatctgttttgctcttctttacagaatcgtactgttgaaaaaagatgggaatattgccggccttaattttatcattttgaaatttgtcataaatgatgctgttcttggtcagaatgactttgtttttggttataaagaaattcagatcagtgtcttcaaagattttgcttagtatatcctgtatggttttattagagtaatctccggatattaatacgttgttatctatccattccttttgaaagtagaatttgtaatttgtcgaagcctctattttttttaaaacttcaacccgattgatgttgctgtaatttatggtgatcttttgatcttgtgaataaatgcattgattaaaaccgaaaaataataaaagaagggtaaatattctcatttggataattgctacagattttagttatttatgtacttgaggaggtttttcataaataatgcagcatcttcttttctgagatttctatacatcagataaaaatcatttatttttcttttattctcctggaataaggatatgatctcttttttatcatttacaggataaaaattgttctgctttaaaaggataaattcttttctgtctgtatatcctattaaatcaacttcggctttattgctttttttcttctctttagagtgttttatgtaaagaataagattgtttcctaccgggatttcttcatagtatcctttcctgaaagtggttgaattcggaatgtctaaatgaacaaatttatcattgcctattttaaaggaactgatgttttcggtaaagagattaattttagtggagttaagttcgccatatggtttgataatcaattcatcggtataagtatcgtagttgagtagcagatcagaataattttgattgtgatattgcatacttccttttctgaaatcttcggaaatgtaataccggttctcgttgttgactgttttgtcgaagtttaaatgggcggggccattttcaaattctaacgattctacacccagatttttgtcaaaccagttgtatactaggatttcgttgttggtttgcccgtaaattatgtatgcatttaagaataaggccaataaaattatatattgaccttttatttggtttttcttcaaaggattggtggttttgattttttggtttatagctcttcaaaaatatcaaaaaaatatcaacaacagtggtgtttttgttaaattttaataaggttgttattttttgacttaaaaaacgagtgatttatgcggtattattgagtttggaaacctgttttgtcttaaaataaaaaaaaacactccagcttaaaaagattaagccaaagtgtctcgataaaattggggcaaaatttattttttaatctgaaaaatcatctgaggtatctaaaatgtcatcaaatatttttttaagcgatttgatgtagatcggaaatgcgaaggctaacaaaagatattcgattctgaaaaccgtgatgtcgtccagaattttatataaacaaggaatgataaagagaagagagacagttacgccaacccaggggttgttttttattttttttaatatagataaaagcttcatgtccgatggtctgtttaattcaattctcatttagattttataatttggatttcttggtgtaaaagtaatttcgatttgcgggaaggaaattaaaaatgtcatgaaagcagaattttttgtcatgaaattttctataaaccctgtagtcgggtattcttcttttaaaacaaaaaaatcctcccggatagagaggatttgctgagcttttattctttcgtcttactgttgttatgacaaaatattcatcttttttataaaatctttgtaggtatcgcttagatttattttgtgatcaccttttaaaataatgagattatcggccagaataatttcttcaattttattcgtgtttacgattgtatttcgatgtgtttttataaatctgtttttatccaacagattgctgattttggttaaagaaatcagaatgacaaatttttctttctcggttatgatattgcaataacgttcttcaacatcaatataaagaatatcatttaaggctactttttttaaggagttcttcttttttataaacaagtagtcgttgctaatcacagtatcttgctcttcagtctgaaaaacttcggtttgagcataaaacttttctacagccatttctatggcataaagaatttccagttcattaaaaggttttagtaaaaagctgaacggttttgtaagcttggctttttcaaaaatctgacggtcttgtgagctggttaaaaacacaaacggttttgctgcatttggaataatgttaatcgattcagcaaatgtgattccttccggtttcccgtctaagaaaatatcaataattataatgtcgatggtattttcgtaaaaaagttttaacgcatcagcaaaattagttgctatgcctacaaccttataattgttttggagcagtactttacgcagagcatcactttgttcaggggtgtcttctataattaatacatgaatattatccattgttttttgtttttgggaaagtcaaaatcattttagttcctatattgagttcactttctatggctagtgttccgccattttttttgatcatttgtttgcacagctgcaaacctaaaccagtaccgataatttcagagttgttttttttggcgagtaaagcattgtcagcgagtaattcctgaatggtactttcgctcattccgataccattgtcctgaataatgagttcgcaaaaatcagggttggtttcctgagtataaaagctgattttgctattttcattcgagaatttaatagcattgtccaataaatttcgaagtacaatttttaacgaatcgaggtctacaaagataaaactattttttgagaccgaattttcaaaagtaatggctttgtccagtaataaaggtttgtagttgtgttcaatttgctgaacgacagagtacaagtgaatggattctttttgaaagtacaattgtttggtttgtaacatggcccaatgcaataaattgtctaacaaagtgtaagcgccatttgcaatagtactgttttgaatgatgagctggtttaattcatcgtagtttttggtttccagtgtagaagataatttagtgttgctggtcttcaaagcatttacagacgaacgtaaatcatgactcacaattgaaaacaactgatctttggtagcgtttaattcgtcaagtttatttttttgacgtaaaatagtcttaccgttttttactttttgggcgtagagataaacccctgccgttaaaatcaataataaaccaacagcagcaaaaaacaaaccgttacgctgtgtgttttttagtttgttttcgatttcaagtacttttatttgtttttgcttttgggctacagcaaactttttctcaaagtcggcaacggcccagattttgttttgattgttgagggagtctttccattgggcagactcttttctatattctaaagcttttttgtaatttcctctgttttcttcaaccattgacatattgaatgcggtactttcttttttatcgaaatcttttattttcttagaaaagatataggctttcttgaaatatagtatagctttttcatctttatattgtaaataatatagatttgcaatattttggtacaatagcgtaagtgaaagagggtcgttttctttctcgtttatttctttacttttaaataggtattcttcacttttgttaaattgattaagatgtagataacaaactcccagattttcataaatagaacttattcgataatctaaacttttatttgttattagaaatttttctactttcgaaaaatagtagattgctttttcgaattctttcaattcgagcgaaacctgacctaaaaccttatttactagtgggtaaaatgcaaaactttcagaaattaaattcatttcagctttagcttctttaaaaagttttaagtttttaaatgaatatcctcttaaatagtggcaataatcggttaattccttattcctacttgagcttaattgtttcattgaatacactaaagtagagtcccattttttgtttataaagaaatattgagctttgttgaaattggtttcttttttaaattgggacgcctttattttaagcacttcgttaaaattactagtacttgattgtattctggcgtgagatgatatagagaataaacacagaaccgaaatgatgataattttaagtttgtgcatttttcgataatattggttttgtataataaaaagagaaaggtatggtgtgttaaatttatttattacaccatacctttttatgttctaatctgcaactccagttttagttcctctagaagtttcagggtccagatttcgtaaataagatgtaacagatgtaatttggctaattctgtcagaaatataatcgatttcaatataccaaacatcataggtatctggtgtgctttcatcccatgtatagtcaaaatagacttcgatattagtatcgttttctattagtgtaccaactgatggggcagctgaatccttagagttgatgtaaacggtagcacagatttttaaagtaaggattccttgatttctgtaaagctgtgctgaagctaaaggtggaattgggaaagtaaggttgcttttgtctgaaaatacaaaatcttgctgattaattcttgtgatttgggtaacgttgaagttcatagtggtgttttaaggattattaatctgtttttttggtgtgttaaagatattttattttcacatataaatgtaaggtttgtcgtgtttttttgtgatttttctagtaaccaaggcaaattttagttagaaaatgccataaaaacgaaaaaccccaattcaaatgcatgaattggggttttctatgaataaacctttagtaaactaagatctgattactcttttttctcctcacgtggaggtctttgtaaaagtgcttttcttgacactttttcttttttagtttttggatcaacacctaagtattttacttggaatacgtcacccatgtttacaacatcagttacgttttcagtgcgttcccatgctaattcagaaacgtgtaataaaacttcatttcctggtgcagcagtatattcaactacagctccaaaatctaacattttaattacttttacttcgtaagcttctcccatttgtggtttgaaggtaattgacttaatttttgccaataccgcttcaattccggcaggatctgtacctaagatttcgattacaccttgttcgtcaacttcgttgattacaatagtagttcccgtagctttttgtaattcctgaattacttttccaccaggtccgatcaatgctccaataaagtttccaggaatagttctggtaatgatttttggtgcatgtgctttaacgtcagctcttggtgtagcgatagtttcggttaatttacctaagatatgtaaacgtccatcacgagcctggcttaaagcctgctccataatgtcgtaacgtaaaccgtcaattttgatatccatttgacaagcagtgataccatcagcagttccggttactttaaagtccatatctcctaagtgatcttcatctcctaaaatatctgataatacagcaaatttctcaccatcagtaattaatcccatagcaattccggaaaccggttttaccatttgaactcctgcatccatcaaagccattgttccggcacaaacggttgccatagaagaagaaccgttagattctaatacttcagaaaccacacgaatagtgtaaggacaatctgctggaatcatgtttttcaaagctctctgagctaagttaccgtgacctacttctcttcttgaagttcctcttagaggttttgcttcaccagttgagaaaggagggaagttatagtgtaaatagaatttctcttcaccttgttcagatggagaatcaatttgatttgcttctcttgaagttcctaaagttactgtagccaacgcctgagtttctccacgtgtaaacaatgaagatccgtgaactcttggtaaataatccgtttcacaccagattggtctgatatctgttgtttttcttccgtctaaacgaacgcctaattctaaaactacattacgaacagcttctttgtttgttttgtaaaagtatttagaaactaaatcaccatcagcagccaattcttcttcagtaaacaaagcttttacttcttcttttacttcagcaaatgcagcacctctttcgtgtttagcggaaccaacttttgcaatagcataaattttatcgtatgctgcagcttttacttttttgtaaatttcttcgttttctttctcaccttcgtaagtacgaatttcttttttcccaaaagcagcctgcaaacgcaattgcgcctgaatttgaactttaatagcttcgtgagcaaatttaatagcttcgatcatttcggcttccgaaatttctttcatttcaccttcaaccattgccacagaatccatagaagctccaatcatcatatcgatatcggatttctctaattcttctctgcttgggttgatgaccagttttccgtcgatacgtgcaacacgtacttcagaaattaagttataaaaagggatatctgaaacagctaacgctgcagatgccgctaaaccagctaaagcgtccggcataacctcttcgtcatgagacattaattgaatcataacctgagtttcagcatggtaattgtctgggaaaagcggacgtagaacacggtcaactaatctcattgtcaatacttcgctatcacttggacgagcttctcttttaaagaaaccacctggaaaacgacctgctgctgcaaatttttcgcgataatctaccgttaaaggtaaaaaatcaacgcccgggtttgaagtgcgagctgaaactgctgttgcaagaatcatcgtatcgcccattcttactactacagaaccgtctgcttgtttggctaaacgtcctgtctcgattgtgatgcttctgccatcacctaaatcgattttttctacaaataattgtggaatcataatttttcctttttgattatacaatgggttttagttgtgttgtagttgttgttgtgtgtagttattgttctaaaacccaatgaaaaaccaaactttttttcttataaaatgcttgtaatgtaaaaacaaaaagaggcactctcgcacctcttttctatattgattattttctgatattcaatactttgataatctcacgatatctgttgatctctttctttttcaagtagtccaacaaagctcttctcttacctactaatagtacaagtgaacgctcagtgttgtaatcgtgacgattttttttcaagtgttcagttaagtgtgaaattctgtaagtgaacaatgcaatctgaccttctgcgcttccagtgtttgttgcaccaccgtgttgtgcgaaaatctcttctttcttttctttagttaaatacattccaatattgtttaatgatttttatgtatgtcatacaacttttgtaagacgggtgcaaaattagattaaaaaaacaaaaaaatcaaacaaaaataaaagaatctcaaaaagaacagtaatttttgttttcgaacaatttgcggccttaatttgttttacttgtatgttactgttaaaggtatagagtaattgactctaacagggatgcctctttgttggccaggaatccaattttcataactggtaatgactctcatggcttcttcatccaggccataccctagtggttttagtattttgggttcagttattttaccatctttttcaattacaaattgaattattaatcgtccgcttattttattggcaactgcttcttttgtttttgaaaaatttgcccctatgaaattgtaaaaatcttgtattccctttttaggtaatggtcttgattcaagaatgttatattgtgtttctataccgttattatctgtgcttttgccagaaataaatgttccttctttgtaaatgtcatcatactgatggccggtatttttatttattattttccattcgccatccttgaatccattttttaagcttccttttgatgaaaaaggctcaccattttcttcatatgttccatttccatttatgactttatgcttattgttaacatcccaaaagtcataaatcttcatttcagaactaattccttttttagattcaatatattcgccttttaatagagggtttccattttcataccattctgaaatatttccgtttaatcttgatttaatatagttctctgtccttcttttctttccattttcgtagtagtgaatgtattctccttctcttgagcttccatcttttgttttagaattcccttccatttgcaatactccggatttatagtagtttttaatttgatacaaatctttgtcggtgtaataatctttgattattgtataaaaagcatggtcttcttttgacgcgtcttttccaatcgaatcacgataaatgattttgtctgaagaattctgtgaaaagaggaatatgggaaataatgctaaagcaatgaaaattttttttctcataaattgatttggctaattgtattttgagtttcttagtacagtttggcaacttcctgatttacgaattctaaaaatcgttcgtcagcttctgtaaacggatctataacatgactgtcgatatcaatctgaccaatatttactccatcaacaaataacggaacaacaatttcagatttaacagtaaagctgcaggcaatataattgtcctgcgctgcaacatccggcactacaaaattggtgttactttcggctacctgaccgcagattcctttaccgaaaggaataacggtatgatctgtttcagctccaacatacgggcctaagtgtaaggttttgttctcgtgattagcaaaataaaaaccaacccaattatagtattcgatattctcgtttaataactggcagattgctaataatttttcgtctctaactaatacagtgtcagatacaatagcgcttatttttggttgtaattcttggaatgtcataatgttaagattttatacaaaagtatttaaagctaaactcaaaaaatacataaatttgaaaaaaaattttcgttgaaaaaatatctcgtacagtttaaaccctttctcatttttataggcactttttttgcagcctatattgtactcaccttgctatataagttttatctaaacggttttggatcaaatgaagtcgatggaataaccaacactgtaggacaaaatgtcgaacaattgatgcagggttttaattgtgatattaagattcataaaagccttactgattcctggatggaggtttggtacaataagcactattccgttcggattgttgaaggctgtaatgcggtaagcgttatgattttgtttgttgcttttatacttgctttttccggaaagttcaaagccactttgttgtttatagtatttggaattttctctatttatgttttaaatgtagcgagaattgcaatattggttgttttattgttccgtttcccggaaaataatcatttcttgcacggaactttgtttcctttgattatttatggtttcgtttttcttttgtggattatttgggtaaacaaattttcgaagtatgctaaatagaatcctcgaacataagtccaaattaataattgcggttgcgattgtattgtgttttgcagttatcagagcttttgagaatcagctgttctatgacccgtttttggattattttgacggtgattttaaaaatttaccatttcccgaggtgaaaaattttactctttttctgaatttattactccggtatgtactgaatactattttgtctttgtcattgatctatgttttgtttcaggatcgggatatgcttcgatttagtttgtttctgtatgtgttttttgcggtgatacttttggggatgttttttgtcgttcttgaatgttttgcagaaggaaactggcttcttttttatgtgcgaaggttcattattcagcccatatttgtattgttgtttattccggcattttattatcagcagcaaaatttaaaaaaataacaatttatttcgcctttttttggagtcttttaaataattttgcagtatgaaactaaagaagtgtaccggattatttttggccttcctattattggtctccaatattgggtttgcttttgatgtgcactattgtggcggagagattgcttcggtttcattgaatacaacagcagcagctcctgaaaagaattgttgcggaacctctgaaaaaaaatcatcttgttgtaaagacaaagtagttcattttgaaaagaaatcagatgatgctaccttaaagtttttcttcttccagtttgcttttcctatggcagttcaggaatatcaaccgattgcttttcttggaattgtaaatttcaaaagcaatcaggttatttcgtattattctgatgccaatgcaccgcctttatttaagttgtatcaccagtatattttttattcctgattttaatgtttagatccaggccgttttggcttgtgctatgctgtttgtttatttctccttttgaagaaattctatagaaacagccttctatttaacattaaatcatttttttatgcaaaaaagtatactgctttttgtcgcatttttgctatccgtatccgcgttttcgcaagaagatttgcaggaagtaaaaatcacaaaaaagcaaaaaggaataaaaaaatcctatacgcttacctctaatactactgttatcaccagcaaggagttattaaaagcagcctgctgtaacctggccgagagtttcgaaacaaatccttcgattgatgtgaatttttcagatgctttaaccgggaccaagcaaattaaaatgcttggtttaacaagtccttatttgttaatcaccgaagagaatcttccttctgtacgcggagcttcgcaagcttacggattatcgtttaccccgggaacatggatcgaaagtgttcagattacaaaaggagcggggagtgttatcaatgggtatgagagcatttccggacaaattaataccgaacttttaaaaccattaaacgacattccgtttttcttaaatgcttatggctctacagatgcccgttttgagttaaatactcattttaatagaaaactgtcggataaatgggcgacaagtttgtttgttcatggtaatgcgcgtgtagcaaagaacgatatgaacgacgatgggtttttagataatccgcttgggaaacaaattaatgttttgaaccgttaccaatattacaatcctgatagtggtttagtaagttttatcaatttcaggtatatgaatgataaaaaacagaccggagaattggattttgacaagaatacagatcgcggaacaaaaaatcactggggttcagaaatcaatacagaacgttttgatgtttctacaaaaattggatatgtttttaaagatatgccgtatcaaagtatcggttttcagaatgcttttaatacccataatcaaaactcttactttggactgagtctttatgatatcagacaaaatagtttttattcgaacttaatttttaattcgattatcaacaatacgaagcacaagttttctaccggattaaattttgcctacgaccagtatcaggagtttgtaaacgcaaacgattacagccgaatcgataattctgtgggagcatttttcgaatacacttatgataatacggataattttagtttgattttaggaggtagggtagacaatcacaatcgattgggagtttttgttacgccgcgtctgcacctgcgatacaatccatggaaaaatggagtgcttcgtgtttcggcaggaagaggaaaacgttccgctaatatttttgccgagaatcagcagctatttgcaagttcgagaactttttcaattttggatcaaggtgggaaaatttacggattgaatcctgagattgcatggaattatggggtaagtttttctcagaaattccgtctttttaataaaaattccgaaattggatttgatttctatcgtaccgattttcagaatcaggccgttgtagatctgatgcagagtccgcaggatgtcttgttttataatttaaaaggaagttcttttgccaatagctttcaggcagagtttaatttcgaattgattcataatctgaatttaagaacagcttataaatattacgacattcaaacggattatctgcgaggaacttttcagcgaccgttacaggcgaagcatcgttttctggggaatctggaatatgaaacccaagtaaatgatggtaagcaatggaaatttgattatacatttaactggtccggaaaacaacaattgccttatacagcgtcaaacccgactgcagatcagtttcctgatttttcgccttcgtatgcggtgatgaatgttcaggtaacgcgaattctttctcctgtttttgaagtatatgtaggaggggagaacattgggaattacaaacagcaaaaagctattttaggagcttcagatccatttggccctaattttgatgcttctgttgcgtacgctcctatttttggacagatgtattacgcgggattgcgttttaagataaaatagaggtaaaatgtaaaatgtgaattacggagacacgaaaattttattcaatcatcttacatctcacataaaacatttcacacataacaaaaaaaaataacattaaataataaacaagatgaacagaataattttaattgcactagtagcttttttaggattttcagctcaggttcaaactaaaaagaataaatatttaaagtatacaactgaggtaaacggtacttgtgagcaatgcaaaaagcgtattgaaaaagccgcttttagtgttccgggtgtaaaatcggcggtttgggatattaacacgcatcagcttgcagtgattttgaacgaagaaaaatcatctacagcagatttgaatgccgttatcgctaaggtaggacatgatactaaagaggttaaagccacggatgctgattatgataatctacattcctgctgcaaatatgtaagagaataaaaaacaaaagagcccgggtttgtatccgggcttttaatagttaatttatctttaaaatatggcttttaattgtggttgaagcaaattattgttaatttcaccaccttataaatataaccaagcgcatttatgaataattttgattggactcaattaatcaaccctgaattttatataacattaagcattggaggggttcaaattggtttatttattgttctctttatagtttttgctgaaacgggactttttgcaggattttttcttccgggagacagtttacttttcttagcaggtatttacagtcgtgacttaatgcagaatgttgttgatataccaacagattttcttaatgtatttatactttcgactctggttgctataatgggagttttaggaaatatgaccggatattggtttggtgccaaaagcggttattatttgtttaaaaaagaagactctttttggttcaagaaaaaatatttattgcaatcaaaagacttctttgagaagtacggtggaaaagcaattatctatgcacgttttcttccaattttcagaactttcgcccctattgtggcagggatagtttcgatggataaaaagaaattcatgttctttaatgttctaagttctttcttatggtcgtttatactgatcttcgccggacactacctgtatggagtgtttttgaaagaaggaatagatttaaaacatcacatcgaatacatcattattataattgttatcatatctacatttccggtattgataaaactctttaaaaagagaccaagcgaaaagatataattcaaataaaatctataaaaaagtccgaagcaattaagtttcggactttttttatgtaataggtttttcttttgtgaaatgtgagttgtaagatgtgaaatgtgaaatgtgggatctaaaagaatctgcaaactgtcaatccttatgaacctaaaaaaacttagccccttagtatctcagaagcttagcatctttaagaaaactaccattcattcaccttattagcatccatttttaagaagataaacagtagaattgtgaatccccagagtccggaacctccatacgaaaagaaaggcagaggaaccccaattgttgggaaaattccaataaccatggcaatgttaacaaagaagtgtataaacaaaattccggcaacgcaatatccatataccctgctgaattttgttttttgcctttcagccagatagattactctcagaaataaaccggcaaaaagcaagattacgactaaagaccctgcaaaaccccattcttcaccaaccgttgtgaaaatgtaatcggtgtgttgttcaggaacgaatcctcctttggtttgagttccttcaaggaaaccttttccaatccatcccccggatccaatagcaatttcagattgattagtattgtatccaatacctttcatgtcaacactttttcctaataagatattaaaacggtcacggtggtgctgtttaaaaacattatcgaaaacataatctacagagaaaacaaaagctgaaatgacggctaaaaggataccgcttaagatgatatttcggtcaactactcttcctttgaaatgtatgattgttagtattcccaaggcaattaaaatcactacataaggttccagtacgagtgtcaatacaaacaataggattgtaataaatccagtccatacgtaccaggatggcagcccttctctatacaatacaatgatgaaaatactataaattaaggcacttcccggatcgggttgaggtaaaattaataatacaggtgaaaatacaatcgccaaagcctgaagctgcctgttagtgtctttcaggttgatttgtgtatcacttaaatatttggctaatgccaatgaagtggctgctttggcaaactcagacggctgcaaagtaaagctgccaatagcgtaccaacatctttgcccggcaatagtttttccgaataagaacaaaccggctaaggacaatagtgaaacgccaaaaataatagtcgcatatttctcgtaaaactttccatctacaaaaagcaccacaaaaatcaaaggaatggtacatccgataaagattaattgcttttggtaagttccttcggttgacaataatgaggaagaatagatattgagccaccctaatatcaccaacgaaatgtagataaaaacgcttatccagtcaatgttattttttacactttgatttttcatttgaaataatctttgttagttctttttagtggtgtctgatactgtttttttaacttctgctttaggtgtcaccggtttaacggggacaattttagcttttaaagtagaatcttttggtgtagattcaatggcactggcttcattcataccgcccagttttgcatactcgctggctaagcttttgtttaaaacccttgtttctaaatcggtcctggtgattttatgtctcagatatttttcaatcattaaactggcaatcggacctgccactgtagctccaaatcctccattttcaatcataatggcaatggcaatttttggattatcctttggtgcaaaagccacaaatatagagtgatctttaagctgtgttcttttgccgttaatttttgcaaaattttccgcagtacccgtttttccacaaatatcaatgccttctaccctaagggcataagctgttcctttgttatacacatcaaataaaccacttataactggtgggaaatatttttggtcaattgtggtgacatgtttagtggtgaatttggcatcaattttctttccttcgatctttttaatgatgtgaggggtataatagtatccctgattggcgaccgttgccatcatgttagctagttggataggagtcattagaacttctccctggccaatagcattcgatacgatagttgtacttctccagcctccgttcgggtaaattcttttatatgtttttgatgttggaatgtttcctctcttacctgttggcaggtcatagcccataaattgtcccaagccgaaacttttaatgtgatcactccaaacatctaccgccttagcaggattgttatatttgttaatggttaacatgtaagattgtgcaaaataggtattacaagagttgtaaatcccattgtgtaattgatgagggccaaaaccgtgacatttcataaaacggcctctaccatagctaaacccatggtggcacataaaagtcgtttgttcgttgataacgccttcctgtaaagcaaccagaccggtaaggattttaaacggagaaccgggagggtactctgctaaaagtcctctgtcgtataatggttttgcaatagagtcgtgatataaaagggtgtaatttttagatcgttgtcttccaactaaaattccgggatcataagaaggagcagttaccaatgccaaaatctctccacttttaggttcgatagcgacaattcctcctcttttgttgatcattaattcttctccgtatttttgaagttcggcatcgattgttaaattgatgtcttctcccgctacggcgatagtatcgtatttaccctctttgtaagagccaatttctctgttatatttgtctttctgaatgtattttacacctttaatacctctaaggatgtcttcgtagctttcttcaacaccttgctttccaatcaaatctccactattgtaatatgggtttttggcaattaatcgctcgtttacctgtgtgatgaagccaaagatattggcgccataatctacttcatagtcacgaagggaacgcttttgaaaataaaagccttcatattttctaattttttcctgaaaagcggcgaactcatttttgttcagctgtgctaaaaataccgaaggcagtcttgggctgtatactttggctttggcaattcttttgtcgtactcttctctggtaatgtttaataaagtacagaattcaggaatattaaggttttctttgatttctctcggaatcaccatgatgtcataagaagcctggttggcaaccaataattttccatgtcgatcataaatataacctctttccggatagtcatattttttctttatggcattattttcggattttaacttaaacgaatcatcgatgatctgtaaataaaagatcctgatcactagcaaggatgctgcaataataattaaagagggcagcaaaacttttctcatcgtttattaggcttaataaggtaaattatgataattgaggtgattatggtaaaaatcgaactaaataacgttcgaagtaaaacgtccagaataaatttaaattgaaaagcttcgagaataaataacacgatgtggtgtaatacaacagaaactaaaataaatgaaaatcgttcgggagttaaggagtcattcagtttaatagtttgatattcgtaactgagtccaaacgagaatttaaaaatgtaaggcctgtaataagctagtacaagacatgctgctgcatgaattcctcctgaattacaaaacatatccataataattccaagtaagaagctggatacaatcaaacctgttcggttgctgtttaccggatacaaaataatgtacaagatatatgggaagggacttatgtaccctaaaaaattcatattattgaaaataacaacctgaattgctagtaacataataaatcgaaaaatattgagtaacaaagcgctattcatttttctccttgttttctaaattaataagttcttctctgtccttgctcttgatgatgtatacgtgtcccaagttggtcatatcgttaaacagtttaacatttataacgtagtaacttgtgtttttctcaatatagatcttgtcaaccgttccaatgttgattccttcagggaaaattacagattgtcctccggttacgatggtgtcaccttttctgatcgaagctaatcttggaacatcttttaactgtgcaaatccggtgcttttaccgtcccaggtcaatgatccaaaatgatttgactttttaatcttggcattgatttgagattttgtgttcaaaatacttacaacagttgcgtatcttggtgatgtgtcatcaataataccaataattcctaagctattgattacccccatatccggtttaacgccatcgtttgcccctgagttaagcgtgatgaagttttcgtgtgtgttataggagttgtgaattacttttgaaacaataatatccgcaggtttaactccttttacactgtctgccaaaggtagttttgtggtgtcttgtttgttgaataatagactttttaatcttgcgttttcaagtacaagttcgtcattttcagttcttagattcaaatattcatttacgcgattgattctttcataaacacctccgcttagaaaattagccgaactgattattttgcttctgtggtaagaatgagactgaactgtgagtgccaacgaaatacctaaaagcagcaaaaacagcaatcgattactgtttcttataatgaaattaaaaatttgctgcatttcttgtatggttattttgtttcaggatatgcttttggtttcaaatttaatcagagccaaatgtttaaatttggctccgagaaaatatattgattgttattatggatcttatttgattaagatacttttgaactttgtaatgtttttaagtgccattccggttccacgaacaacagctcttaatgggtcttcagcaatataaacaggtaaatctgttttttgcgaaatacgtttgtcaagacctcttaacatcgatccaccaccagctaaataaatacctgtgttgtagatatcggctgctaattctggcggagtctgagataatgtttccattaccgcatcttcaatacgttgaatcgatttgtcaagtgcttttgcaatttcacggtaggaaacatctacttgttttggtttccctgtaagtaagtctctaccttgaactgacatgtcttctggtggtccatctaaatcttcgattgcggcaccaatttgaatttttattttctctgcagtactttctccaacaaaaaggttgtgttgcgtacgcatgtaataaacaatatcatttgtgaaaacgtcacctgcaattttcacagatttgtcacacacaattccacctaatgcgataacggcaatttctgtagtaccacctccaatatcaacaatcatgtttccttttggctgcatgatatcgataccaataccaattgctgctgccattggctcgtgaattaagtaaacttcttttccgtttactctctcacaagattcttttaccgctctcatctctacttcggtaataccggatggaatacaaaccaccattcttaaagccggagtaaacatgcgttttttcaatgccggaatgcttttgatgaacatgttgatcatcttttccgaagcatcaaaatcagcaattacaccgtcttttaaaggccttatggtcttgatgttttcatgcgttttaccttgcatcatattggcttccttaccaacagcaatgattttgcctgatattctatcacgtgcaacgatcgacggactatcaataacaactttatcattatgtatgattaaagtgtttgcggtaccaaggtctatcgcaatatcctcggtcatgaaatcaaaaaatcccataagttttttaggggtttaaaatgttataaattattttgaacaaagttaaacaaattaatgtttaaaatgacgtgttcccgtaaataccattgcaagattgttttcattgcaataatttatgcttaattcgtcttttattgagcctcctggctgaataacagcagttattcctgcttttttggctaattctacacaatccggaaatggaaaaaatgcatcacttgccatcgaagcgcccgttaaatcaaatccaaaagcttttgctttgtcaactgcctgaactaaagcgtcaactcttgaagtctgacctgttcctgacgaaattaatgttccgtttttagcaaatacgattgtatttgatttggtgtttttacaaatttttgaagcaaatatcaaatcttctatttcttcagctgtaggctcagtaatagtaacggtttttaaatgctctttagtatctgtaatattatttctgtcctgaattaacaatccgttaagacatgttcttacttgtcttgttggtaattcaacttcattttgaattaaaatgattctgtttttcttttcttgtagtattgtaattgcctcttcgtcataacttggagcgattactacttcacagaataatttattgatttcttctgctgttgtcacatcaattttagtatttgaaatcaaaactccgccaaaagcagatgttggatcacatgccaacgctgctaaataagcctcactaattgtttttcttgaagctaaaccacaagcgttattgtgttttaaaatggcaaatgttgggccgtcagttttgaactcattaattaagtttactgctgcatcaacatctaataagttgttgtatgataattcttttccgtgaacttttttgaacatagcgtcaaaatcgccaaagaagaatcctttttgatgagggttttcaccgtatcttaaaacctgaccatctgcaatactttctttgtaaatggtttcgtcagtgttgaaatagttaaaaatagctccgtcgtagtgagacgaaacgtggaatgctttggtagccaataatcttctgttttcaagagtagttgctccattttgttctgtaatcaaatctaaaagcaggctgtattcgtttaccgaagcaacaattacagtgtctttgaaatttttagcaccggcacggatcaaagaaattccgccaatgtcaattttttcaataatatcctgctcacttgcacctgaagcaacagttttttcgaacggatacaaatcaacaattactaaatcaatctgaggaatatcaaattctttcatctgctgaacgtcactttcgttatcctgacggtttaaaattccaccaaagattttcgggtgaagtgtttttactcttcctccaagaatttcagggaaagaagtaatgtcttcaacaggaacaacaggaatgccaaggttttttatgaaatcttcggttcctccggtcgagtaaagtgttacgttttgttcgtgtaattttctaacgattggctctaagccgtcttttgaaaaaacagagattaatgccgattgtattgttttagttgtgctcatcgtgtagttatgatttttgagactgcaaaagtagtttttttatatattattttaaagaaaattaatgtaacattatgctaaaaaaatctactgatgagtaagttaacttttattaggtttttgattttaaattattgaattttactttattgaaaaatacgactatatgcttgtctatctaagattattaaaagaaagtttaggttttgccgtaaatgcgctgcgaaataataaactgcgaacgttgttgtcgttattgggtgttacgatcggaattttttcgattattgctgttttggcagcggtcgattctttagatcgtaaaatttctaaagatttgagtagcttagataaaaatacaatttatttaatgaagtttagttttggaccttctgaaattccacaatggaaaagagatcagtttccaaatgtgaaatacgatgagtatgtagggctgaaaaattcattgaccaatacggatcaggtggcgtatcagctttttgtaaaacacgaaagtttaaaatacgattcaaaaactgtaagtgatgtaaatattatcccttcgtcgaatgaaattgtagatattgaaggattaagttttgataaggggagattttataccgaatctgagtcgaattccggtgcggctgttattgttttgggttacgaaattgctgaagggcttttcggtacaagtgatcccattggcaagagtatccgtttgtacggacaacgttttaatgtaattggtgtaattgcaaaacaaggagcgggtttttttggcgacagtaatgatacatcggtttatttgccatccaattttttacgccgaatgtatggtgatagtgatgccatgacacccgtaattgttgtgaagcctgtaaaagggattgacatggatgcttataaggcacaggtggcacaaaaaataagagctattcgtggtatgaaagccggagaaatggataatttctttattaatgtactttccggatttaccgattttatagatggaattttaggacagatgaatgttgtgggatggattatcagtggattttctcttttggtcggtggttttggaattgccaatattatgtttgtatctgtaaaagaaagaaccaatttaatcggaattcagaaatcactgggagctaaaaaccgattcattttatttcagtttttgtttgaagcagtaattctttctgttattggtggaataataggtttggtgatggtttggggaattgcactggtcttaacaaaagtgcttgattttgaatttgttcttagtttcgggaatataattttaggaactactctcgccgcatttattggtttggtttcaggaatattacctgcgatatctgctgcaaatctggatccggttgaagccattcgaaccgggatgtaagcattctgttaaaaaaaatcaatttttaaccgttattattttggctctgctgttgaattttatcgtaattttaataccctaatttaaaaagcgatacgatgataccagttaaagcttatgcagcctatgatgctgttaatccgttaaaaccctacacgtttgaaagaaaagaagtaggtgcccatcaggttcagatagaaattttgtatagtggggtatgccattccgatattcataccgcaaaaggggattggggccctgtaaattaccctttagttcccggtcatgaaattgtaggccgaattgtagctgttggaagcgaagtttctaagtttaaaattggagagctggcgggagtggggtgctttgtagattcctgcagagtgtgtccaagctgtcagtccggtgaagagcaattttgtgatgaaggaatgaccggaacttacaatggtgtagagagaggaacggatattccgaccaagggaggatattcaaccagtattattgtagatgaaagttatacgcttcacgtttctgagaaactcgatatcaaaggagttgccccgttattatgcgccggaattacgacttactcgcctttgcgttatttaaaagttggtaaaggacataaagttggagttttaggacttgggggcttaggtcatatggctgtgaagtttgcagtttcttttggtgccgaagttacgatgttaagccactctccttccaaagaagccgatgctaaaaagttaggtgcgcatcattttgctttaacctcaaatccggaaacaatggaatcgcttgccaatagtttcgattttattctgaatacagtttctgccaaacacgatcataatgcctatttgaatttgttaacgacaaacggaaccatgatcgtagtaggtgctccgcctgcacctgctgaaattcctgtttttactttaattatgaaaagaagaagtatcataggaagtttaattggaggaatcagagaaactcaggaaatgctggattactgcgccgagcataatattacttcagatgttgagattatcgatatggggtatattaatgaagcttacgaccgaatgaataaaagcgatgtgaagtatcgttttgtaattgatatggcttctttgaggtagttttataaggttcaaagaggcaaaggtttaaaggtctttttctttgtgtaaactttgcgagccttgcgattaagatttaaacgcaaggctcgaagagttttttattttgaagatttggtataaattttagttcgggtagctgattgtttgatatgtcgctccgttggagcttttgcttggattgaatatttttggttatagaataatgctccttcggagcttaatcgtatgaaagaaaagtctgtaaagcttgttttagagcttcacagacttttgtctttattgaatcttgtatgtggtttaagtaaggattttttatcgtgttagttgtttacctttttgtattctaaagtgccaagctgctcgtgggtaataacacgtttctgactgtcgaagtagtcaatttgaaattttacaggaataagatcaacggtaacagttaaggtgttgttgtctttcgaaagtttccatttgccgttggtgcttttgtctcctacgattcctgtaaattttccatcctcattaaagatctgaaacacctgatcactcttgaatttttcttttatatctttttctgttccgtttttggtaagttttaccagttgccattttccaataagttcttttgacgtttgtgcctgaatggaaagtgaagctaacataattagtgctagaaaaacaatctttttcataaggttacgattttaaagttagattttgaggaacaaatatatttttgaaagggcttatttttctttcagtactttctctaaatattcgactttttctttttcagcctgaagcatacgttcgtagagttcaatgactttatctaatggattgaaattgcaataatttgcatgaaacattccatttgctccattacagctgttgtcgtaaaaattattgaaataactaatcatattttcttcgttaaagttttttatagcctcaacacttacgccaagagctttggctacttctgcgagttttgcatcgtctatggtttcgctgttttctattgtggatacagtttgctgagaggttcctaaagcctgagccaaagcttcctgtttcatgtctttaagttcacgaatacgactaatttttcgtcctatgtgatttggttttgttgctgtactcataattcaaagatatttaaaaagctttaataaaaatggaatttggtaaaaaacacatcaattattgtgagatacatttttaatagttcgtttgggttaaagctattataatagattgatgtatgtaaagcaaaaatacaatttttcagacaagtattaattagttgttcttaaaattgttagttataaaaattccgtaggaatgaaatgtcggtaagaatatgatttatcatgttgaagttacacattgataaaaattccgtaggaatgaaacgtcggtagtttatcgtgttgaagttaggattgtgtttttgcacgccgataaaaattccgtaggaatgaaatgtcggtagtttatcgtgttgaagttaggattgggttttgcgcatcaataaaaattccgtaggaatgaaatgtcggtagtttatcgtgttgaagttaggattgggttttgcgcatcaataaaaattccgtaggaatgaaatgtcggtagtttatcgcgttgaagttaggattgggttttgcgcatcgataaaaattccgtaggaatgaaacgtcggtagtttatcgcgtcgaagttaggattggtttttgcacgccgataaaaattccgcaggaatgaaatgtcggtaggaacggcatattttgttggttataaaaataaaaaaatcccaagaagcaatttcttgggatttaatcgttttagaagtttaaaaactatctaatttcgttattctgaatcaaatcgatatacaagttgattttgtctttcaattcttttcttggcgtgataaagtcaaggaaaccgtgctctaataagaactcggcagtttggaaaccttccggtaaatccttaccagttgtgtcacgaactacacgcggaccggcgaaaccaatcaacgcgcctggctcagaaatgttgatatctcctaacatggcataggatgcagttgttcctccggttgttggatctgtacaaagagagatataaggtaatttagcttctgctaattgcgctaatttcacagatgtttttgctaattgcattaaagaataagcagcttccatcatacgagctccaccagatttagaaatcattacaaaaggtagtttgtttttgatagcgtgatcaatacctctggcaattttttcacctacaacagctcccatagatccaccgataaaggcgaaatccatacagcaaattacaagttcttttcctttagattttcccactccggtacgcacagcgtcttttaggtgagttttttccataacgtctttcagtcgttctgcatatttttttgtatccacaaaatgcagaggatctttagaagtcatgtttttatctaattcaacaaactcattattgtcaaataaaatttcaaaataggttgcgcttccaattcgaacatgaaaatcatcttcaggacttacaaataagtttcgggctaattcgtcagcatcaataatttttcctgttggagatttgtaccacaatcctttcggaacgtccatcttatcttctgtagcggtcgtaatccctttttcctgtcttttaaaccaagccattattttagattttagattttagattttagattttagattttagactttgaaaaatctaaaatctaaaatcagaaatctaaaatttatagtgtatttacgttatttaagtctgcaaaagcttgctcaagtcttgtattgaacgttacttcgctttcacgtacccattttcttgggtcataatattttttgtttggaacatcagcaccttccgggttaccaatttgagtttttaaatagtcaatgtttttaaccatataatcacgtattccttctgtgtatgcaaattgtaaatcggtatcgatattcattttgattactccgtatccaattgcttctctgatttcttcaagagtagaacctgaacctccgtggaaaacaaaatctaccggattatgacccgtgttgaatttgttttgaacgaaatcctgagagttttttaagattttcggagttaattttacgtttcctggtttgtaaacaccgtgaacgtttccaaaagcagcagcaattgtaaatttagggcttattttagataattcttcataagcataagcaacttcttctggctgagtatataattttgaactgtcaacgtcagagttgtcaacaccatcttcttcaccacctgtaataccaagttcgatttctaatgtcattcccattttactcattcttgccaaatattctttgcagatttcgatgttttcttcgattggctcctcagataagtcaatcatgtgagaactgtataatggttttcctgtttctgcaaaatgtttttcagaagcatctaataaaccatcaatccaaggtaataatttttttgcacagtggtcagtatgaagaattacggttgctccgtaagcttctgctaaagtatgaatatgttttgctccggcgattccaccagcgattgctgctttttcacctgcattagatagtccttttccagcgttaaactgtgctccaccgtttgaaaattgaatgataaccggtgcatttaattttgctgcagtttcaagaactccattgattgtacttgaaccagtaacatttactgcaggtaatgcaaatcctttttctttcgcataattaaagatctcctgaacctgatctcccgtagctactcccggtttaatattgtgtgccattgtaatttttttttagttgtttttagtttttaggttgcaaaaataagaattaattagcattagaatggataatttattccaaaatttaaaaccgagtgcccaaaattgtattctttaaaccagcgatctcccttctcatgtgctgggttataggtcttaaagcccatatctaaacggataacaaaaaagcttaaatcgtatcgtaaaccaaatcctgtacctagtgcaatttcagctaaatcgtttacgctagagaattttgctttctcatcaatcacattatcgagcacattccagatatttccggcatctgcaaagatggctcctttaacggcgccaaaaattttaaaacgaagctcggcactcatggcaattttcatattggcctcgttgaaatcatttgcggcatttgtgcttccgggacccaaagaatagggctgccatgcgcggttgtcgtttgaacctcctgcataataacttcgtgaaaacgggatgtagtttgaatttccaaatggaaccgcaattccgaaaaaggttcttacggccagtactttttcttttccaaaatcccagtgtttgatataatcaaattcagttttgatgtattctgaatattccagattaaaaatttcataattgcctttgtcatttttttgaaagttcccaatgtttgaaatagcagataacaaagtaccggctgattctattttggttttaaactgatagaatgtattatcggcaagatctttttttgtggttttggtaaaagtatagctggtggccagaataaagtcattctcggtcagacgaattcttctttcttcgatgctttttacatctttataggcctgatccgtaaggattaagctagaattgggggacaacacatcattggtaaacccggtagtccctttgggaatgcttaggtttcgatcgtccggactgttataataatcctcatttttattgtatatcgtaccaatattgtttaattctctataagatgttctataaacgttaaagtagttatccggatttaaatttcgtacgaattgtgcattaaggagttcaaattttgccgtattccctcgtttaggagaccagttgtaagcgattcctcctgtgaaattttctttgtccagtccaatatttctttgtttagagaaacctgcagcaacgctggtggaaggaatcattctttttggaataattttttctgttccaaaaggcaataagatccttgggaaatttagtttcaaatcgagaccatattcagaaacgttgaagaaattgttgttggggttcgccatatctctggatgaccctaaatttaatcgcgtagaaatttccaaagtttcggctctgttaaaaacgttacgaatagtttcggaaatacttgctccaataccaaaatcctgaatgttagaatgtgtaacgtcaaaagtagctccaaagctgtatttttttcttggagtaagatagacattagcaattaaggactgcgcagttgagtcgcgtttgtcgactgtatactgaatagacggataattgaaaattttcagattgttcagatatcttgaggaaagagtagttctggtgtctgaaaaagtacttcccttggtgatgaaaaccgcatcggtaatggctcgtggtctgtattttagttttttataactgtatagattaaagttgttgtaggtggtgctgtctgtgattttattttttgcatttgttgcagaataatcagtgtagatgttgacatcactaattttgtacagtttaaaaggctctgttctgcttgaatctcttccctggatgttattgttgtttacaatcaaagttacattggctttgtcttttttgccaatagtatcaatatcaaaagtcacataagtaggctggaaataataggctccgtggtttctaaagtaagtggtaagacgatttttttcttcttcaaaatctacggttttgtattgttttcctgattttaaaaccgaagggtcaggattaactttgtataacgagtctaacgcaggagtcattattttcgttttgatagtgtctaaagtataagcaggtccggttgtaatattgtagtttatcttcgctttttttcttccaacactgtcaatattataatctgttgcaactttaaaataaccactgttgaaataataatattttagacgaaggagtgttttctttgttttcgcagtatcaataattaccggagcttcaccggtgctttttagaaattcatgaatacctttgtacataaaggattgtcccagacgatctacttgtttcgcagataaaagttttgactggcgttcgtacaaacccggattgtttttgaatttagctttataggttgagtccggatttaaattggcaaggttgtataaattcaaacgaagacgatatcctaatagggtaccatttggtttttggtacatttgattgaaggcagtttcgtcgttagttgacttgccatttacaagaatagtatttttaacaagaaggttttttccatcaggaactctttttacagcattacaagcgcaaataaatattgctattaggataaatgctattatttttgtggaattctttttcaagtgttcttaaatatttaattcaaaagtacattattttatggttagtaaaaaccaaataaagcttatctcagggttacatcaaaaaaagcaacgttttgcaaatcaattgtttttcgccgagggagtaaaagtaattcaagaattgttgcaatccaattttgaactagagcatttatacacgactctaaatgattttgaagaggttcattcttcaaagcgaactttaatttatgagcaggaacttaaaaaaataagtgctttatctactcctaattcctgtttggctgtttttaaaattcctgccgaaaataaaataatcgattcgggcttaattttggctttagacgatattcgtgatcccggaaatttaggaaccattttgcgcctttgtgactggtttgggatcaagcaaattgtttgctcaaaagaaaccgtcgatatttacaatccaaaggtggtgcaggcaaccatggggtctattaccagagtaaatgttaattatgttgatctcgaaacgtttatagctcaaacaaaattagctgtatttggaacttttatggatggcgaaaacatctataaaaccgatcttcctcaggatggaatcattatcatgggtaatgaagccaacgggatttcaccggaaattgaaaaaatggttacaagccgacttaccattccaagatttggagagctgcaaaaaacagaaagtttaaatgtagctaccgcaacagcaattattcttagtgagtttaaacgaaatagttaagtatttgttttaatgaaaagtaaaatttattaaaatagctcttgatttcatagaatcgatattgtcagtccaagggctaggtccgtttgccggattatcgcgaattaactcgtctgaaattccaaacattcctcgaatagaaggagagaagatgaaatactcagagaaaatgtctattccaaaacctagctcataagcggcagtccattgttttactctgaatttcccttcgaagttgtcgtcttttgatttagcattgctggataggttaagtgtcgaagacattccgccaactaaataaggacgaatgtttccggtacgcaatgccgagaattttaagagtaaaggaaagtggatatacgtactgtttacttccctaaggtagtctttttgcaaaggcaaatttgggtaatgcaagtcacgtttggtatagtacaatcctggttcaaaacgaagattaatatattcttgtaatcttaaatctgctacaacaccaacattaaaaccggtagtcttttttgtttgaacatcgggaccgggagatttgtagtcaaacttaaagtcaaaactattaaacccaaggtaataaccgaaatacaggcgttgtttttgccagttttcaagattaatgataggatctttgctgaacatgcttttagcaaattgcgaatatccttgcgtcgataagactaatagaagtaagactacaatttttttcatactattttttagaggcagaataaatggttgcaacaccaaaagtttgaggcattgctacaacatctataaacccaatttttcttaaaatattgttcagagcttctccgtaagggaaaactgcagcagattcagataaataaccataagctgaattgtctttagaaaagagttttccaataatgggaaggatgtttttgctgtaaaatttatagccttgtttgtatggtgttttgtccggaaccgaggtttccagaattacaaaaacaccatttggttttaaaacccttagaatttctgcaaatcctttttccaggttttcaaaatttcgaacaccaaatccaactgttatggcatcgaaatgattgtcgtcaaaaggaattttttcagaatctcccaaaactaaatctatagtattagataacccttttgcctgaacttttttctttcctacctcaagcattccggctgaaatatctaaacctataattttttcagcattggtctgcgacattaatatggcaagatcaccggttccggttgcaatatcaagaatgatttttggttttgtatccgaaacaattttgagcacttttttccgccacttggtgtcaattccaaatgagatcacacgatttaaattatcatagttgccggagatgttgtcaaacatttgggcaacctgctcttttttacctaaagaagagtctttatatggagttattttttcagacattattttaatttacgcaaatataatacaatctgtcttaactgtaattgggttttttattttgtgttttaattgttttaaaagtaggggggattgatgttggatatcaaatttttttagcatcaccaaaaatggttattttgaaaaaatcactaaaagtgggtattgtggaaccatggatttatatgcacttttgtcacagtaataatgatgaagtttaaaagattgatcgttataaatggctcaaagtaactgagtattatttttgcacttgtgcttaagtttgtcaggaaagtagttaaagaggtattgtttttggggtcaatactctattttttaaaagtgtgaaatacgttcttaggattaaatttgtttttggaaatttgcctttaatatcttagtggtatttgttattaaaggcgtcccttgagattatatctcaacaaacagtgttatttaattatttcaaatgttatttttaatatttgttattttatcaaagctatttcctgagtgagtccatttagaaggtcaattgtttttgaaaaacatcctccaaaagaggatgtttttttattttcggatataagtttcgtacgtataatcatagaggtgcttctcgtctttaaaattctcttccgattcaacaagctgccattcattttcattgattttaggaaagaaagcatctgcttcaaaagtatgatgtactttggtaacttcgataatatcggtataaggtaaaccaagattgtagatttcgccccctccaataatataagagtcttcgtctttagggcatacggctatcgctttttcgatagaatcaacaacaatacagccttccggatggtaatcattttgacgagttattacaacatgtactctgttgggtaaaggttttgggaaactttcgaaagtttttctccccataataatatgatggttggtagtgagcgatttaaatcttttaaaatcattcggtagatgccaaactaattcattgttttttcccagttcgttattttcggcaacagccgctatcattataatcatggtattctaaactaaattttattttcagaatcttcatttactttcgattctaactgactaattcttttctgttgtaaagcaacaagccggtcaatttgttctctttcccattttttgttcatgaaccggtctgtgatgtatacttttataaaatgtaaaatgaagataaaaagccagattgttatggcccaaatacaccagtcttgcccgttggtggctccaaggccaaagaatcgattggcgataaataaaaataaactccctagaataaaaagcacaaaatgaaaataaagaaccttcttttgtctgattcttcttctggcatactcgtattgttcgtgtacttccttttccataagatataaatgaggtcataaagttaaaatttattttgtaatgatccatttagattggggaatatttctattaaagtgatttaacgctttgaaatccaaaattttatatggatttatttatcgatagtaaaaaaaataaggagtgtttttgatataatcataaaacgattacagaggtgaggtgagttcagatgaatttatgtaatttagtctatgaatctaaaaattaaatagttatgtctttaaagaaacagtttgtaaaaacgaaacccgtgtgtaaagtcacctttacaatagatgcaaaagatgcaaattcggcggcggttgttggggattttaacaattggaatcccgaggaaggagttttaagtaaattgaaaaatggaacttttaaagctacttacgatttggtgaaagacgcgatttacgaatttaaatacgtagtggacggagtgtatgaaaacgatccggaggcggattcgtataagtggaatgattatgccggaagcgaaaacagcgtgttggtagtataaaaaaatccgcttaaaattttaagcggatttttttatgttttatacagcaacacttccttttatgccggcatgcggttcgtaatctaaaagtgtgaagtcattgtaatcaaagtcgaaaatgtttttaatctccggatttaaaaccatcttaggtaacggtttcggctcacgtgtaagttgcagttctaattgctcaaaatgattgttgtaaatgtgggcatctccaaatgtgtgaatgaattctccgggttccaagtcgcaaacctgtgcaatcatcaaggttaataaagcataagaggcgatgttaaacggaactcccaaaaatatatcggcacttcgctggtacagttggcaggaaagttttccttttgtttctcctttttcggtgtcaggacttgtgacataaaattgaaagaaagcatggcaaggaggtaaagctgctttgttgttggctacattttcttcaaatgattttttagtatccggcaggaccgaaggattccatgctgaaaccagcattcttcggctgtttggatttgtttttaactcagtaattaattcagagatctgatcaatttcttcgctgttccaattgcgccattgatgtccgtaaacagggcctaaatcgccattagagtctgcccaggcatcccaaatttttacaccgttttcctgaaggtactttacgttggtatcaccttttaagaaccaaagcaattcatatatgattgattttaggtgtagttttttggtggtaaccattgggaaaccttcacttaaatcaaatcgcatttggtagccaaaaacacttttggttcccgttcctgttctgtctcctttttggcaaccgttgtctaaaacgtgtcgtaccaaatctaagtattgcttcatggtgctttaagctttaggctttaagtttaggctttatcctaaaaacttatagcttgttttttatgtttcgggctttaaagcttacggcctaatgcctacggcttatagccttaaattatcttttcgaaatttcgtctcgaattttagctgctttttcgtaatcttcctgagaaacagcctggtctaaaagttcgtttagttcctgtaagctatgtttggaataaatatctccggattgattgctttcctcttcacgtccaaaagtttccggattcgaaagtacatcgtcgatttcctgagatccctgatcggtttctgccgtattcgattttaaataaattcccgctttgtccagaatgtttttgtaagtaaaaatcggagcattaaatcgcaaagccaatgcaatggcgtcagaagttctggcatcgataatttcttcgattttgtctctttcgcagattaaactggaataaaaaacaccatccacaagtttgtgaataattacttgttttacgactatatcaaatctttcagcgaagtttctgaacaaatcgtgcgttaagggacgcggaggtttaatttctttttccagagcaatagcaatcgattgtgcttcaaaagcaccaataacgataggcaattttctttcgccatcaacttcattcaaaattaaggcataagcgccattttgagtttgactgtatgaaattccttttatagataattttactagactcatatatatgggtaaaaaagggcaattattgcctcattttgatactttttttgattgaaaaataaaggtgcaattttaatcaaaaaatatggaacaaaaaagctacctaaaacaaagatacgattatcttgtttttaggtagctatatttttaaagagaatttttaaattaagaatgttgtgctttaaaagcttttaatttctcaattaattgcggtacaatttcgaaagcatctccaactactccgtaatcagctactttaaagaaaggagcttcaggatcgttgttgattaccacttttacttttgatgagttgatacctgcaatgtgctgaatagcaccagaaattcctattgcaatgtataaattagtggcaaccggttttccggtttgtccaacgtgctcgctgtgaggtctccatcctaagtcagaaaccggtttagaacaagctgttgcggcgcctaatacagaagcaagatcttcaactaatccccagttttcagggccttttagtccacgtccgcctgaaactacgacatcagcatcggcgatagaaacttttccggttactttttctacagattctacttttactccaaaatcgttgtctccaattgttgggttgaaatcttcttcggttgcagatcctgcactttcgaaaattccgtaagagtttttagcaagaccaagaacttttacctctgtagtgatttcagtaatattgaaagctttgttagagaaagcatttctttttacctgaaaaggagaagtgctaaccggcaatccaaccacatttgaagcgaaaccagcgtttaaagctacagctactaatgaagaaaggtaaatactgtctgttgtagaagaaagtaaaactacttttgtagcttctttttcagcggcttgtttgatcacatcggcataagccttagcggtaaaaccggctaatttatcgttgtttacttttaatactttatcaactccgtattttgataattcgctaacgtcactaatgtttacggttaaagcggtaacagttgttcctaaagtttcggctacttttttagcgtaagaagctagttcaaaagctacttttttaaattttccttctgcagattctgcatatattaatattgacataataattttagattttagattttagatttcagatttttagaattgaaatctaaaatgattattgattttagattttgaagtgaatcaattgttggttttagatttagtattgcaatctaaaatctaaagtctaaagtctacaatcttagatcaccttagcctcgttgtgtaataaattgattaattcatctaaattatcaggagaaactaattttactgctgatttaggagctggtttttcaaattttaccgcttttgtgtttaccggagcatcaactggttcaagaatagttaacgcttttgttcttgctgtcatgattcctctcatgtttggaatacgtaagtctttttcttcaacaagacctttttgaccaccaatgattaaaggtaaagtagtgcttacagtttcttttccaccatcgatttcacgaactgcttttacattactgccttcaacagtgatcgaagtacaagaatttaaaaagttagaacctaaaattcctgcaatcattccaggaaccattccaccattataatctaaagattcttttccggcaattactaaatcataaccaccatttttaattacttcagccaattgttttgcaacaaaaaaaccatcagttgggttggcatttacacgaattgcttcgtttgcaccaattgccaaagctttacgtaaagtaggctctgtatcaggtcctccaacatttacaacagttactgttgcaccttgttgctcctgaaaccagattgcacgtgtaagaccaaactcgtcattaggattaattacatattgaacgccattggtatcgaattctgagtcaccattggagaagttaatttttgaagtagtatcaggcacatggctgatgcaaactaatattttcataagtatatattttgataaattataaaacgcttccacaaatttagaaattaaaatcgaaataatatactatgcatgcataatattttttaaaaactattacgttttcgcagattatggaataaggaaagccgttcgtcgttattgaatagtgataatgcattgatgtttcctgattcttagggattttgtaaaacaggggttgctcgaactgttaaatttgttgtggattatactataatttcgattgttacgttagttagtaggaattttactgaagtgaagtctgacattagagagggaagttgggctgaaaaaaagtttttaagtgaaaaaacgttaattacatcgatttcgtaattatcacaataaatttgaaaaagttaaaagcgcaggagagacggaagttcgtgtgattttaaattcaatttatgcttttaagtgatttaaaatatttatttttgctcttcagaaaattcaacatacaatataaatatgagaacaatacaatttagagaggccatttgtgaagcgatgagcgaagaaatgcgtcacgatgaatccatatatttaatgggcgaagaagttgcagaatacaacggagcttacaaagcttcaaaaggaatgcttgctgagtttggtgaaaaaagagtaatcgatactccaattgctgagcttggttttacaggaattgcagtaggatcagcaatgaatggctgtcgtcctattgttgagtatatgactttcaacttttgtttagtaggtattgatcaaattataaataatgctgctaaaatgcgtcaaatgacaggtggacaatttaatgtgcctatcgtttttcgtggaccaactgcttctgcaggtcaattaggagcaactcactctcaagctttagaaaactggtttgctaatactccgggacttaaagtggttgtgccttcaactccttatgatgcaaaaggacttttaaaatctgctattcgtgataatgacccagtaatttttatggaatctgagcaaatgtatggcgacaaaggtgaggtgccggacggagaatatacaattccattaggagttgccgatattaaacgtgaaggaaaagacgttacaattgtttcttttggtaaaattatcaaagaagcttttatcgctgctgatgaattggctaaagaaggaatctcttgtgagattatcgatttaagaacagttcgtccaatggataaagaaactattcttgcttctgtaagaaaaacaaaccgtttagtagttttagaagaggcttggccatttgcaagtatttcatctgagattacttatatcgttcaggaacaagcattcgattttcttgatgcgccaattcagcgtattacgactgccgatgcacctgcaccatattctcctgttttactaaaagattggttgccaaatgctggtgatgtagtaaaagcagtaaagaaagtaatgtacaaatagtaaattaaacgatacttataaaacttcatcagtcatgttaattgatgaagtttttttttgcaggattatgaaaagaataattttactcagcttattttttgtactcgcactagtgggtggcgttgctgcacaaactaaagtgagtggaattgttttagacaaatcgaatcagccgattccgtttgccaatgttgtttttaaaggatcgaatacgggaattgtttcgaatgaagacggacgtttttatctcgaatcgcctaatacttacacgaccttattagtaagttcggcaggattttcagatcgggaggttacgctggaaaaagccgtaaactatgactttaagatcgttttaagcgaagctgaagcactgaatgaagtcgttatttttaccggaaaaacctctaagaaaaacaatcctgcgctggatattctgagaaaaatctgggaacgtaaacgcaagaacggactgtaccaattcagtcagtatcaaatgcagaagtatgaaaaagtcgagtttgatatgaacacgattgatagtgcttttatgaagaataaactcttcaaaggaatggagtttgtgttccagcatgttgatacatcagaagttaccgggaaaacgtatctgccaatttttattagtgaatctctttatgatgtgtacggagataataaattaaagaaaacaaaggagaatctgaccggaaataaaacttcagggtttaatggtaatcagcagattttgtcttttgtaaaagatctgtactccgattataatatttacgacaatcaccttaaatttttcgataagagctttacaagtccgctttccagaaccggaattgacgtctacaattatgttttaaaagacagtgcatatgtcgataaaaaatggtgttataatatcgttttttatccaagacgtaaaaatgaactgacttttaaaggggatttttgggtaaatgataccacttttgcgatcaaaaaaattaatatggccgttactaaaagtgccaatattaactgggtaaaagacatttatatcgaacaggaatttgaggttgagaatgattctgtatttcttctgacccgtgattatatgatgtctgattttgctttgaacaaaaaggaaaaatcaaaaggggtttacggaaagcgaaccacattatataaagatcataaattcaatcttcagaaaccggaaagtttttataagcaggaagttaattttattgataattctgtctatacgaaatcggatgagttttggaatgaaaaccgttttgaaaaactcaataaggatgaggcgggtatttataaaatgctcgacacgttgcaaactgtcaaaagattcaagcaactctatagcttagtttctattctgggaagtggttatgttgagtttaagaatttcgattttggacctatcttttcaacattcggttataatgaagttgaaggattgcgattgcgtgcaggaggaaggacatattttggaccgaacgacccttggcgtatacaagcctatacagcatatggttttgacgataataaattcaaatacggagtttccggaaaatggatggtggacaagaaaaaccgtgtcattatctctggaggaaacaggcgcgatatcgaacaaattggtgcaagtttaacgactaccaatgatattttaggacgaagttttgcttcttccgccttatttaccacaggaagtaatggaaaattgacgaacataaatctgagcaatgtttcccttgaaatggagcctcttaagaattttgttgttcaggctggagtttcctatagaactttagaatcggcttctcctacttttagtttagactattatactactttgccaacagcggcaaatccggctggtgtaatagccaataaggtaacacagtcagaagcgaacattcagtttgagtttatgcctaatcgtaaaactatcggttttggagtagagcgaaatattgttgacagtccttttagtcatttctttattaattttagctatggtttaaaaggggttttaaacagtgattttgcttatcaaaaagttcaattgttttataagcagcctattatcattggcccgttaggaagatccaatattatcattgaaacaggaaaaacctttggtacaattccgctgggattaatgagtgtaatacccggaaaccagacttattttactatcgagaacacattcagtaacttaaatttctacgagtttgtaaccgatcagtatactactttacaatggaatcatgattttggaggaaggctgtttgcaagaattccattcatgagaaaattaaactggagagaatttgtaggagtgagagcggtacatggaaccatttcggatgccaatcgtgccattaatgcttcgggcttaccttataatgcacccgaaaatgtgtattgggaatacaatgccggaattggaaatatattcaaagtatttcgtcttgacttctcctggagagggaattacctcaatatgccggatgcaagcaaatttgcgataaaaggttcatttggtttttatttttagataaattgtcagattttttcttaatttagtttctatgagtataactatagaaagtaagaatctaaattggacaaataatcttagagttttagccaccatcagcgtgatcgtagtgcatgtagcctgtgatattctctatcagtacggtcatatatccaattttacctggtggacaggtaatgtttacgacggtcttgtccgtttttgtgtaccggtttttttgatgcttaccggagcattaatgctgaacaaaaaatacgaactgaatgattttctgagaaaaaagttctcgagaattattttacctttcttattctggagtcttttttatgttctgttaacggtcagaagcgaatttttgttagaatctgaaaaagcatttgtcgatatttttaagcgtgcctttacacttattatcggagggagttcctttcatttatggtatatttatatggttattgggatttatctttttatcccgattctcagcaagtggattcagaatgccaatgaaaaagagatattgtattttctggccatttggatttttgctctaatgatcaatcagcctattttttctaagttcagaatcaatgtggacctgacctattttacaggttttttaggctatctggttttgggctattatttgtcggtcaagtcatttcaatacgatgcccgaagactcaaacagatttctgtactcttgctttcttttggagccattatcaccattttcgggacttattttctgtcgatagcagaagattgttttaatgaatatttctatggctatctgacttttaatgtgatgctggtctctattggattgtttattttctttaaaaattcacaaattacaaatccggtactggtacgggtgattggttttatcaataaatatagttacggtatttatctggttcatattttggttttgcggtttctggtgtcttcaggaatcgattatgattttataaatccggttttggctattcctattacaacgttattgtgtttgttcctttcttctgttattatttatgcggtgaataaacttccttacgggcaatacatttcagggtaatgattcccgtaattttgtttaattttgagtattcttaaaacaaagttatgcaggaagctatcgattttctatctgccagaaaccctgtctttctggaaattatcgacaaatacggattgccaccaattccaaaacgcccgcaaggttttgagactctggtattgcttattttagagcagcaggtttcgatagattccgcaaaagctacgtttttaaagataaaggcttatagggcctgtagccctgaaaatatggtggagttatcggatgaagagtttcggaatttaggagtgagccgtcaaaagacgaaatacattaagatattggcagaagccgttttgagtaaagaactggacatcgaaagtctggctacaaaatcggcaaaagaagttcgtgaagagcttattaaactgaaaggaatcggaaactggacgattgatatttatctgatgttctgtcttcaggaacccgatttgattccgttgggagatattgcagttgtcaacaccattaaagaattattgaatattcacgacaaaaaggaaatggaaattcacgcggaacaatggagtccgtatcggtcttatgccacctatttactttggcattattatctaaacaaaagaaatagaaagattacgtattaactccctgttttttaaaagaaaagtgaggagataaatgcagttttttattgtaaaaagggattctttagttacttttgcagtcgaaattatagaaataataaaaaacaaaaatgaccgcagacaaactaacaactttcgatgtgttaatcgaaataccaagaggaagcagaaataaatacgagtacgattttgaaattaaaagaatgcgtttcgacagaatgttattctcttcaatgatgtacccggctgattacggatttattccggaaactttagctcttgatggtgatcctcttgatgtattggttttagtaaacgaaccaactttccctggatgtgttatggaagtaaaaccaattggtgttttccatatggcagatgataaaggaccagacgaaaaaattatttgtgtaccagtttctgacccaatctggaattcattaaatgatctttccgatatcaacggacacttagtaaaagaaatcgagcacttctttcaggtatacaaagatcttgaaaacaaaaaagtggatgtagaaggatggggagacgtaaacgaagcttatgctattattgcagagtgtacaaaacgttttgatgatattgaaaacaaaccggaaggattatttagcattaaataatttataagccgcccaattataaaaaaagcaatactaccgtcaggagtattgcttttttgtttaaattcgtttgagttagtttattgacttttaactattaaccaaaaaaccattactagattatgaatgcatttatgatttatttgccaatcgttatggcaattttaggattacttttcatgggaataaaaagggcttgggttttaaaacaagatgcgggcgacggaaaaatgaaagagatttcagatcacatttacgagggagccctcgcctttttaaaagcagaatataaattattgaccatttttgtaattattgccagtattgcattggccggaattacttttattccgggagttaaaacgcatttattaatagtagtcgcttttatatttggagccttattttcggcttatgccggtaatatcgggatgaaaatagcaacaaaaacaaatgttagaaccacgcaggctgcccgtacgagtttaccgcaggctttgaaagtttcgtttggcggaggaaccgtaatgggacttggtgttgcaggtttagccgtgttaggacttacaggtttctttattatcttctttaatatattatcaggtggcgtatggaaagataccgaaacgatgactattgttctggaaacactggcaggtttttcacttggtgccgaatctattgctttgtttgcgagagtaggtggaggaatttacaccaaagctgccgatgtgggcgctgatttagtgggtaaagtagaagccggaattccggaagatgaccctcgtaatccggctacaattgccgataacgtaggagataacgtaggagatgttgccggtatgggagccgatttgtttggttcgtatgtagcgacagttctggcggcaatggttttagggaactatgtgattaaagatatgggaggcaatatcgcggatgcttttggaggaatcggaccaattttgcttccaatggctattgccggtttcggaattttattctcgattatcggaactacactggtaaaaataacagatgataatgccaaagaagcgcaggtacaaaaagcattaaatataggaaactgggtttctattgttcttacagcaattgcctgtttctttttagtacagcacatgttaccggaagtaatgacgatggaattcttcggagaaggatcgcagcagatatcttctatgcgagttttctatgccactttggtcggtttagtagtgggtggagcaatttcatccgttacggagtattacacgggattagggacaaaaccggttttggccattgtacaaaaatcatcaacaggcgcgggaacaaatgtaattgcaggtttggcaaccggaatgatttcgacttttccaaccgttttattgtttgcggtagcaatctggatttcctatgcgttagcaggattttacggggtagctttggcggcttcagcaatgatggctactacagccatgcaattggcgatcgatgcttttggcccaatctccgacaatgcaggaggaatagctgaaatgagtgaattgcctaaagaagtacgaaccagaaccgatattttagattcagtaggaaatacaaccgctgcaaccggaaaaggttttgctattgcctcagcagctttaacgtctttggcattatttgcagcttatgtaacttttaccggaattgacggaatcaatatttttaaagcaccggttttagccatgttgtttgtggggggaatgattcctgttgttttctcggcattggcgatgaattctgttggaaaagcggcgatggatatggtgtatgaagtacgtcgacagtttaaagagattccggggattatggaaggaactggaaaacctgaatacggtaaatgcgttgaaatctcaacgaaagccgctttacgcgaaatgatgctgcctgggattttaacgattggtttcccaattgcaattgtattattaggtaaactggtttatgcagacaacaatcagttaattgctgagatgttaggaggatatatggcgggagtgacggtttccggagtactttgggcagtttttcaaaataatgccggtggtgcctgggataatgcgaaaaaatcatttgaagccggagttttaatcaatggcgaaatgacgtacaaaggatcggatgcgcacaaagcagcggtaacgggagataccgttggagatccatttaaagacacatcaggtccttctatgaatatcttgattaaactgacttgtttgatcggtttggtaattgcacctattttaggagaaggacattcgtcttcgggaatgatggaaaaaggttcctgctgcaaaaaaatggaaatccacgttgcaggagattctaaatgtggagatttctcgaagatgactaaagaagaatgtgcccaaatgtgcaaagaaaaaggatgttctgccgaagaaacagcaaaatgtctggcgcattatgatgctaatggaaaatacgttcatcaaaaaacagatcgttttgatactacccaatacagtaaaaaaagagtagaagtaaacctgtctacggttaatggtgttacagtgggaactgtaaccaaaaccgaaaacggtaaaaccactacagaagtttttgaaggaacagaagccgaagtaaaagccaaaattgaagctgtgaaataagtatatttatcctaatagttttttaaaacctgttaggataaattaggtttcggaatcggataatgtatttcttcgtatttttcgatgagtatttccgaaaaaaagagccatcggctcgacctattttgtagaaccggattttaatccggtttcgaaataaacacacaaaacaaagaaccgtaggttcgaaacatataaatccataaaaaaatgcctctaaatatttagaggcatttttttatggatttaaagcatattctttaattaaggttgaagccggaatatgaagtacttctgttaaaatcctgatttggtttaaggttagggctctttttcgtttaaaaatttcggatactcttgagcgactgtttaaaataacccctaaatcggcgtctgtaattccattttgttccatcataaatttaatggcttcaattgggtcaggttccggaatgggataatttatttgttcgtatttttctatgagtgtaaccaagatatctaattcatcaccttcatccgtattgggtttcgcatcaaaaatagcatttacacgttctaaagcaagatcataatcgtgttccgttttaataggtcgtatttccatattacttataagtttttaatatcgtcaagcttgtcataatcacggtgggtacccacaaatagaatgtagacaatttgagtttcataattaatttttacaattaagcgataatgatttccacaaatattaaaaacgactttattatggccaacaaaatctgcagaaccgaagattgcttttatagtattcgaattatcaaaattatttttatcaaagatttgataccatgataacaactgttgttttgcatttgggaaacattcccaaaaattttgcaaggttcttttggctattattctcataatggattagacaaagataagtgttttttcccaattcgggaaaagtttttaaaaaacgaaacaaaagtaggttattgtttacaagtaaaaggagtattaaaactttaaataacaaaaaatgcctctaaatatttagaggcattttcattggtgtaaatttgtgaaattcgtgtttctagaacagtccgtttaattcagcatcaattctgttaatgatgtttcctaagtcttccggattatctacgaaattaatattgtcaacatcaataatcaataattttcctttagtgtatgtttgtatccacgcttcatatctttcgttcagacgacttaaatagtcaattgaaatagaattttcgtaatcacgtccgcgtttgtgaatctgtcctaccagatttgggatagagcttctcaggtaaattaacaaatcaggagcttttactaatgactccattaattcaaaaagagaagtgtaattttcgaagtcacgacttgtcatcaatcccatagaatacaggttgggagcaaaaatatgggcatcttcataaatggttctgtcctgaataattttctttccgctttcgcgaatttgtaatatctggcggaaacgactgtttagaaaataaatctgaagattgaacgaccaacgctccatttgatggtaaaaatcatctaaatacggattgtcaactacatcttcgtaatgaggctcccatttaaaatgtttcgccaacaatttagttaaagtagtttttccggctcctatatttcctgctatcgctatgtgcattacggtgttacgattttataatttgtgatttctttagctgtaaaaatagataaaatttggtctttgtaatagaatttgtcgaaggatttttctaaaatctcaatttcagaaaatgcattggattccggacttgtaatatctttaaaatacaacaaattagccttgctgaaaagatattgatgatggttcataatttcgacagcatcatattcggggattttgcccaaagccgttatttttccgaaaatggtacacgagaaccaattgttttttttgtcaatccaataaaaagtattgaaatcggtcaggtaatattttataggttctgttaatggtgtagaaaccgttttatattcattattcagataatcaaaaagaccaatttgctgatttaaagaattgtaaatccacaattgattttgcgctgacattccaattgccgaaacgataattggggtgttgctaaacgaaaaattaatttcagtaattttattcagttgattgtcgagtaaaaccactgtattgaagttttcgtaaaacaaaactattttaagcggattctgtaagtcgactttcgtgatcgttccgagagaaacatttttatattcgaaaacctctttttctttgattttggagaagacattatttttgatttgataatagtatccaaacgaatcatagcctaaaaactgatcgatattattagcaaaatgagagactgggactgcctttatttttaggttttgcgaaaagacagttgagaaagaacagatcacaaaaagaaaggataaaagaaaaggatgtgttgctctgttcatgatgtttacgtttctaagagccaaattacaaaaaactacagtagaaatggcgcaaaacgctgttatttagattttgccgctttcggaattgtaatggtctgataaataattgattttatctatatcttaagggagttgatctatttaattttttgcattttaaaataaacaatacatttgagtataagtttattagaccaaattcacttttaaagataacacaatgaaaaaagcaatctattatatgtcgttgatgcttgtaatcacacagatgcaggctcagaaagattttcagggaatggccgtttacgaatcgaaaacacaggctccaaaaatgggagaaatacgtgcgaatcgtgaaattacacccgaaatgcaaaagaacatggaagagcgaatgaagaaaatgctcgaaaaaacatttgttctgaattttgataaatcggcttctatttataaggaagaagaaaaattggaaaccccagggcaacaaggaggtggaatgagggttatggtgaattcctttatgggcggtggaggaactttttataaagatgtcaaagccaaaacctacacggtagataaggaatttatgggtaaagaatttctggtaatagattccctgccgaagttaaactggaaaatggaatctgaaacgaaacaaattggtggatacacttgttataaagccacagcagtaaaagaagccagcaaaacagattttaggaatctcagacctaaaaacaaagaggagaaaaaagacgatagcggtaaggcttccggagaaacgaagaccaattttgcggataatttcgaaatgcccaaagagattattataactgcctggtactcgccggagattccggtaaatcagggacctgagaattattggggattaccgggtttaatacttgaagtaaatgatggaagaactactattctatgttctaaaattgtattgaatgccaaagataaaattgaaatcaaaccttcaaaaaaagggaaggtgatttcgcagaaggactatgacgaaacggtcataaaaaaaatggaagagttgagagaaatgaaccgcggtcgtgaaggcggtccgggaggtggtccggtattgataagacgttaatttatagcacatcatttttagctttttccaatgaaaaatatatttgttttcgttatttttttaatgacgtctctttgtgttgcccaaactgtacgttttgatggttttattcaggacgaaaaaaagaatccattggaaatggccaatgtgatggcggttaatacggctacaaaagctatggattcgtacggaattaccaatgacaaaggaaagtttcagctgacattgaagcctaatacttcttattccatcaagataagttacctcgggatgaaatcaaaagaaattgcgatttcaacccaaaccgcgaatatcgcccagaatatagtgatggacgatgccggaattgaattagagggtgttgagatagtgcgtgaaatgccggtgtcgattaaaggcgatactatcgtttacaatgccgattcttttaaatccggaaccgaaaaaaagctggaagatgtattgaaaaaactgccgggtgttgaggtaaatgccgatggagagattgaagtcgaaggcaaaaaagtcagtaaattaatggtcgaaggaaaagacttttttgatggggatacgaaactcggggttaaaaatattccggccgatgccattgataaaattcaggttctgagaaattacaatgaagtcaaagcactaaaaggtctggaaaacgatcaggacaatgtcgcgatgaatatcaaacttaaggaaggtaaaaagaacttttggtttggcgatgtgaccgccgggattggcgttgcagaacttgacagccgttatatcatcaatccgaaattgttttactacagcccggaatacagtatcaatctcattaccaattttaataatattggggagttgccacttacagcacaggattattttaaattcacaggaggatttaagaatatgatgaaaaaaggaggaagcaattttaatgtttcgtctaatgatttgggaatttcgattttgagaaacaatcgcgctaaagaaattgaaacgaaatttggggcaacaaactttgcttataccgttacaaaaaaatggaacatcagcggttttgggatattatctacttcgaaaactgatctcgaaaccaaatcgaaaacaactattttagattccggaaacgaacaaaaaagggatgaattaacgcatcaaaaaaataatttgggactttttaaactcagttcgagttataaacccaacgaaaaattccagtttgattacgatatcttaaccaaattatccaaacaaaatgaagataccagtctgctgcgtgaatcagttgtgagtaacatttcggctttggaaaccattttgaccaataaaagacaggatccaacttcggtaaatcaggatttgagtctctattacactcagagcgataaaaacatcttcgcttttgaaatgcagcatttgtatcaggatgaaaatccgttttacaatgccaacttacgtacgcagccctttgatctggctggttatatttccggacaaaacagaaacgatttgaaccaggagcggttcgtaaaaaccaataaaatcgatgctaaattggattactactatatggtgacacccaaaagtaacatcaatattacgctcggaaatacattttcgtatcaggattttaattctcatatttttcagattttggacaatggaactaaaaatgatctgaatgatcccacgaataacaatcaggtacagtacaattttaatgatgcatttctgggatttcactataaaatacttgccggtaaatttacattgacccctggagtcagtgtgcatacttacaacatgaaaaatacacaatcaggaaccggctattcgcaaaactttatgaaagtattgcctgatttttttgccttgtatcaaatcaaaaaatcagaaacgttaacttataatttctctttatctaacgattttaccgatatcaatcaattggcttcgggctacgttttgtccgattacagcagtttgttcagaggaaaccgttatctggagaatgccacatcgcaagtgcattcactacgttatttcaaatacaacatgttcaatttcgagaatatttttgccaatgcgacctatactaaaaaagtagatgctatcaaaacaaaagcaaattttgaagggataaaccagtcttcatcgccatataattcgaacctggccgacgaaacttttaccggaatggggaattacggacgttctttcctgaaaaactataaagcttctgttaacgccagtttcaattggtcaaaattcaataacattcagaacaacgtactggcaactaccgaaagttttagtcaaagttataccgtaagagcttcaacaaactataaaaactttccgaacatcgaatttggatataatgcactaattaacaaatacagtggatcaacgttttatacggataagccttttgccagattggattattacttcctgaaaagtttctcgtttgtttcggaatatgaattttaccattattacaacggcaacaaaacggtggataacgaatatgattttttaagtgccagtttaatttatcaaaaaaaggacagcaaatgggagtataaaattgcagctactaacctcttaaatacaaagtaccttaatgacgacagcttctcacagttttctacaagggtttcccaatatacggtacaagcccgttacatcatcttttcgatgaaatataatttatagtattttgagtacaaagtacggactttcagtactcgattttaattagaatacggtatctttacgcgcgatattaacaaccaaaattttgaacatgcgcaattttacctggagttttttaatgtttttttgtttcgtttttacttctttttctcaaacaaaaacgcttgaaaaaggaacttatctttctaccaataaaggtcagaagatcaaactgaatttattagagaataacaaatacgaattggttttttattccggcgattatcagataaagggagattcggtatcatttacttcaattgacaagccggaaagtggctttgatcttgtttttaaaaatgataaaaaggccaaaaaagttaaaattaaatttattaatccgtcttattattccttttttattggttcgcaaaacggatcgaatgagattaagtaccaacgattatcagatatttggagccaggaaaatgtagaaagtgccaatcctgatgctgaatttgaaattgaccgtgcagattacctgtatttggttttcgaagattataagggagaaagtaaagtttcgaaatttgctttgccaaaagaagtctcagaggtaacgatcaactaccaacccgatctttttgggaatttgaatatttccggtttctttaataaaaatacaaatgaacttatggtttcggagaagtccggaaaggatccgttagtttttgttaaccaaaaaaatgcccagcctgaaaaaacgtcaaaagtagttccgctggaaattaagagtattgtaaattggacttatccggggaaagatattgcagagagtgaagagtatgccgtagtagtcgattctgctgctacagcggctgattctgtatatgttcctgaaatttatgattttaaattcaaaattcaagacaatcttaaaagtgctctcgcggcaactgcagctgataaaactaaattcttggttgtggcagttgatactaaaaatccttctgcaaaaaaggattttgatacttttattgaaaaacaggaatctcttttgggcgttcatatggctactgcttatagcgcagaaaatgattcttttaatttttatctggccaatgccaatgataaaaaatggctgaaatcagttaaaattacggatgataaaagtttgattgtcttaaatgagaatggggacgttttagcaagtgcaaaatccacattgttggaaaaagaagcactttttgatatctactcggattttgccagacaactaaaaattgcagatacttattattcgctcggcaaagtggtaaaaaataaaaaagcaagtgacgaagatttaattgcagcattccgaaaatcagttctatcttatgattttggaaattattatacaatatacgaccaaaccaatcaagaggactttaaatttgccaatactaaggtggatctaaaagaagtgactccggtatggaaaaaactaattgagacacatcaaaaagatacgaaaccaaatatgtatctggtggagactattttgaaagaaatcaaaaatcagggattctctaaacaagtttcgaaagaagataaagttttaaatgatactgattttctttcaatcgattatttaatcaaacattatgatgctattgatgcggagcgtttagtatacaatgaaaaagaaggagagaaacacaatatgggaagtctaaatcaagaaattgcaggagctttacagcaaaacaagaatatcgtgtcaaatgaagcttccgttgcaggtaaccaggacaaaacaatctcggtctacaaaaaactaattgcagccggaaaaggaaattttgagacctatcagaattatttagcttatttagctgaaacagctgacaacgatggctctaatggagcttatttgaaagaattcaatgcttattttactacaaatctgggagataaaggaaatgtaattgaaagattggatcagatgtttggggcattagggactgattctgaatatggtttcaatggttggaactggtttaaggaataccattctaatctttgtaattcagcggcatggacagtagtatcaagacctggaaataccgattttttaaaatcagcaataggatggtctgagtatagccttgccgttacaaagaacaatccttattacttggataccctggcgcagttgtattataaagacggacaaaaaaacaaagcaatcgagacacaaattttggctgctaaatatctgaacagtgaagttgaagaacaaacagcagtggagatcagagagacactaacaaaaatgcaaaacggaacctattaaaatagaagtgtttcgtaaagtaataccccgacagttttcaggaactgtcgggggtatttttttagttttttatttgtacaagcacgtttatcatataacgatttacggttttcttattgtctttaattttgccactggcgctgaggtacgtaatcagaattttatattttgaagtttgcacctcctgagttacttttttatcataatcgtgatctcgtctaaaatcaggacttgtattaataaaatcagtaatttttaatggaatgctttccttgttaatctctaaatttaatccgtaatcttctaccgtagaggtaagagaatagcttttattctcaatttttacacaatcatgacattcataagggttgtcactggaaaggtcaactgaaaagtcatatccgtgaatgttcagcaccttgttttgttggtaataaaagtaaaacgaatcattgatttgttcttctctggcatattctgactgatattcataacctaaagcttccatgatttcataatcgcttggatctttctcttttttaaggagggtttccagcttggttttggcatacggaaccataatttcaaccccataattgcgctctaaaaatgaaacaatactgcttaaatcctgttgttgttcgaaactcagttttttagcggttttattttgtacataactttcaaaacgggccagctgactgtatttcgaaatcgaattggcgctttgtggtccggctatagaaaacaagcctgcgagacataaacttattggaatgaactttattttaggatgcttttgaatgagaaaatatcccacaacaagggataaccataccgacattaacagtacataatagcgttcatgtgtaaaaccatacagattgattcggtacaaaatagcccaaaaaagcaatactaataacggaattaataaaaaataaaaccagcggttaaaagttcgcatccagagattagccgtttcagttgcaatgggatgaaccaataaaaaagaaaggattccgaaaatagcaaacaccaaaacgagataggaaacccagccgacaggcagtgaaagtgtcagcagaatttttgcttcataacaaattaaaatcaccagatacagactaatcaggggcaacaacacaaattgagtgaagtttttaagtcctttcgggtaatttaaaaccaggggagccgtgctgttattcgtttccggaacaccgcttaaaaagaacgtggtattaaaaaccccggcaatcacaaaaaagacatgcatgtaaatgcgatcgtaaaagtcaatattaaaaagcttgtcaatcgctaaaattgccaatgccaaacccgaataaagcactatactgtacaaacctgccgttaaaattcttaggaaaagctgtttgttgaattcccaaaactcatcctgattgtaagctcttggcaggaaaccggcaaatgaaaccaataaatgaaatacaatattcagaaccataaactgctgtatttcgacatctgtagtatacttgtgaaaagtattgacaaagagaaaaacaagacttcctaagccaatactaagggcaaaacgcaggaagttattttttttagcagctagaaaaaacaaactgacagagagaaataaaacgagactcaaagagcagctcattaaagctttttcatagaattctttgttgggactgttataatttccttcgctaagaattatggcaaagacagttcctaaaatggcggttaaaatttctaaaggaaatcgaagaattgtttttagcgttgcgttcagaacgttttgtaacgatgggagtttactcattttttttatcagttataccaattgaaggattattgatgctatcattttctggtataatgccgatatagtatgaaaatagtctgattttgattagactatatggaatacataatcggtattattttgtactaaggaaggtaaattgtaagagataaacaaataaaaatcgcaatgctaaaaaaagaatactgccattttgctgattttgcatttcgataatgtttaagagcctgagccgctttttattctctttaaatcactaagtttggaatactaaatttaaaacgtatgaaaaataaaatgatcctcgttttgattgcttacggaggagtagttttttcgcaggcagttaagaaacctttagtttcagcaattacagataaagatttaaaaaccgatatgtaccagatggccggagatcattttaacggtcgtgaagctggaactttagatgaattaaaagtatcgatgtggctcgccaataaagccaaagaggccggaatggcaccggcaggtgatgacggaacttattttcagttttttgatttgtacaggcatcaggtgacacccaatacaaagtttaaaattggacaaaaagaatataaactgtggaaagatgttctcgtagcagaaacgacgaacattaaagtagacgcaccattggtttatttgggtgcagccactaaagaagcaattgaaaaagccgatatcaaaggaaaagcagttgtattactagcttccaaagaaggcattgctgacgatatttcgcttttcgacagacgttacccgggtttggttcgaaacaaatattatgatcttgtggtaaaaaagggcgcaacggctctgattatggttgccgatgagttagcagagcaaagctggtctcaggtggaaccgcaaatgacaagaggaatttatggaattgaaggttttcgagataaaattggtgctacaatgcccgttttttgggtgcacagcgatcaattggaatatctaaaaaacaccaaagatcttttatcaactgaagtaatttcagaaacgtataaatatccttcggtgaatgttgtaggtaaaattgaaggaacagatcctaaactgaaaaacgaatatgttctttttagcggacatcaggatcacgatggggtaagacaaaaatacggacaggactctatttacaacggagccgatgataatgccagtacctgtgtggccatgttagcgattgcaagagcgtataaaaagcagcctggtaaaagaacttctttatttgtttttcatggttcagaagaaagaggattattaggttcaagatggtatgcttcgcacactacagttcctgaaaaagatattgttgctgtattaaacggagatatgattggaagaaataatgtcaatcaggcggctcttttaggttccagttctcctcatgaaaattcatctgatctggttgcaattgccaaaaaagcaaacgatgaaggccctaaatttgatctggataaactttgggacagaccggaacatccggagtatttttatttccgttccgaccatttgccttatgcaagaagaggaatcccatctgttttttataccagtgttttacacagtcaatatcatacaccaatggacgagtctgaaaacattgattttgtaaaattgcgcaaaatgaccgagtggatgtaccgtacaggctggattttatcaaatgatgcaggtcgtccgaaaacattgcctaatgtgaaattggagcgttaggaaatagtggtttgtgttgagttttagacgcggattcgctatcgcgaaaacgcggataaaaacggatttttatacttttttactgggaagtaatttaaaaacatgcgatacaatttatatcatagtccaattcaaaaataggcataacaaaaaaggctttcttaaattttagaaagccttttttttgtcaactaattcgatagttttcaaaaataaaatccgtttttatctgcgtttttacgaagtaaatccgcgtcatccgtgttgaaataaaatctggatttcgccgaataatgcaggccatcagggagtaacataaaaaaaccgatttctaaaaatagaaaccggtttttttatgtttaagaataaatagttattgtctaacaatctaaaaaaatccaagctagtctaataatctatttagtctgataatctatttagtctgataatctaagatctataatccgaaagccgcttttacctggtcaacaaaatcaagtttttcccaggtaaacaattccacagtaactgttttttcgtttccacccggagcagagaaagttttagttacagtttccggtttacgtcccatgtgtccgtaagcggcagtttcactgtaaatagggtttctcaatttcaaacgctgctcgataaagtaaggacgcatatcaaagatagcttctactttcttagcgatttcaccgttggttaagtttactttagaagttccgtaagtatcaataaaaatacccattggttcagcaactccaattgcataagaaacttgtactaaaatctcgtcagcaacacctgctgctactaagtttttagcgatatgacgtgttgcataagctgcacttctgtctactttacttggatcttttccagagaatgcaccaccaccgtgagcaccttttccaccgtaagtatccacaataatttttcttcctgttaaaccagtatctccgtgaggtcctccaataacgaatttccctgttggattgatatggtagttgattttatcattgaataaatgcgcgtgagctggatttttagcaatgattcttggaatcaaaatttcgataatatcttttttgattttagccagcattgtagcttcttcgtcaaaatcatcgtgttgagttgagattacgatcgcatcaatacgagttggtttattatcgtcactgtactctaaagttacctgtgattttgcatcaggacgtaaataagtgatttccttattttcacgtcttaagatagctaactcctgtaataatttatgagacaaatcaagtgccaatggcatgaagttttcggtttcgtttgtagcgtaaccaaacatcattccctggtctccagcaccttgctcttccggcttagccctgtcaacaccttgattaatatctgctgattgctcatgaattgctgaaagaatcccgcaagaatttgcctcaaacatatattcgcttttagtatatccaattttacggattacttcgcgggcaatttgctgcacatcaagataagtattcgattttacttcaccagctaaaattacctgacctgtagtaaccagagtttcacaagctacttttgagtcagcatcaaatgccaaaaagttatcaattaatgcatccgaaatttgatctgcaactttgtctggatgcccttcactaacagattctgacgtaaataaataagccataataatttatataatttattaaattaaaattaagcgagaaaaaataattgctaaaaagggctaaaggagaatttctgctttagcattttttactaccgaaagtaatgtttcagtacccataacgaaccgtttcattatgaagaggttgcaatcagttcaaatttttcctcttgtattcgcgtgcaaaggtataaaaccattttgatttgcaaattaaacttttcatttttttgattttagaagcagaaatttaacatatcatactattttgatagggtaatagaaattattttggtttttgtttggctgattggaaaatagttcgcaaatttgccccatcaaaataaaacaaaagatgaaattaacgatttgcaatatgtcatgtatgatgccggagccttccgcagagacactgttgtagttttttttaagaaatatacatatagaacctctgccgctcgcaggggtttttttgtaccaaaaagaaaccggattgtaaatcattttttaagtcagaaaacaatataaaaccagaaaaaagtaatgaaaaagaatgtagtagtagctttaagtcttttgaccttttcaggcatttatgcgcaggagaataaaaaagaacaggacagtttaaaaaataatgaattgaccgaagtgaccattgtagggtcgcgcagtaaaaacagagtaaaaacagatgtaccggttccggttgacgtttttaatatttcagaaataacaaaaggagcgccgcaaaccagcgtaactcaaattttaaattatgtggcaccttcttttaccagtaatgcaacttctacggcagatgcgacagatcacgttgatccggcacagttaagaggtttagggccggatcaggttttgattttggtaaacggaaaacgaagacatacaagttcattagtcaacattaatggatcgccgggaagaggatcggtaggaacagatttaaatgctataccttcatttgccattgaaagaatcgaggttttacgcgacggtgcagccgctcagtacggctcagatgcgattgcgggagttattaatatcgtattgaaaaagaatgccaactatctttcaggagacatacagtatggtactaacttatcttcgggatcgaataattttaaaggaggagccgacgggcagaatctgcaagttgatttaaattacgggacctctttgggtaaagcaggtagttttttaaatgttaccggtagtgctgtgaccagacaggcaacaagccgcgcgggaattagaagcaacgcaatttttaatgcctacaatgctgtcgagaacagagcagctcagaacggtgtgaacattaattcatttttcagtaatattaataatacctcaaattcagcgcaaattttgaattcgctgaaacagtatgcaccacaagtgggttactttacaccggcacagcaaagtgctatcgcttcggcaggtactattgcgcaaatgcagactgctttgaattttgatgtaaccaacaatgagttggcgtacagaggtcaggaaagaagcgactataatatgagtgtgggccagtctgaattagcatctggacaattatattacaatacaaagtatccgttaacagaaacaacatctctatattcatttggaggtctctcgtatagaaatggtagatcgtatgcttttaacaggcttccaaacggttcaggaacttttacacaggtataccaaaatggatttttaccggaaatagaatcttcaatcttagatgcttctgcagcagttggagctacaacagaattattcggttttgacaccgatattagtacaaacctcgggacaaactcttttaaatatgatgtgaacaatactattaatgctactttgggaaccaattcggcttcaagtttttatgccggtaaagtttcgttcttgcaaagtacaaccaacttggatttaagtaagaagtacgatgttttaaacggcctgaacgttgcctttggtggagaattcagatatgaaaagtaccagattcaacagggagaagaagcttcttacggattgtatgataccaacggaaatttggttcctggaattttaccaagcaattcacctttaatcgtaaccgactttttcgggaataaacgtggagccggagcacaaggattctcagggtttcagccttcagatgctaaagttaaggacagaaaaagtggcgcagcttatgtagatttagaattaaatgcaacagaaaactggcttctaaacggagcagcgcgttacgagaactattctgattttggaagtaccgttacctttaaactggcatctcttttgaaattaacaggcaatatcaactggaggatttcaggacaaacaggttttagagctccttccttacagcaaaaatattttgaaagcagttccactcagttcataaacggttcgccatatcaggttggatattttacaaatgattcacaggctgccaaaagtattggggttgaaaatttaaaaccagagaaatcaaaaagtatcagtaccggatttacattcaagattcctgaagccaatattactattgcaacagatgcttattttaccagaatcgacgacagagtggtattaaccgggcagtatgcaagaccaacagatgcacagatcaatgcagcaacgtcgccgcaacaaaaagatgctttaaccttatttcaacaggcctttgatttaaaaggtgtggaaagagcttcgttctggaccaacggaatcaactcggagaccaaaggtattgatgttgtaatttcgcataaatacaatgttatccccgatttcaccatcagaaatgattttgcattgagttataatactaccaaaagagtgggagaattaaatgttcctcaatccattatcaatgcaggtggagagccttttaaatattcattctttccggagtcaagccgaatttatttagaagaagccattccaaaattgaaagccaatttgatgactacgtttagtatcaaaaaactggacatttatttgagaaacagttatttcggagcagtgacagacccgggagcgactgatgtaaatttagacggatcatcttctgtttacgaacatcctgaatacagcgcaaaattggttaccgatttgtctttcggatatcagattaacgagaaattcagattcaccgttgggtttaataatataggagatgtttatccggaccgaaataatccggcaacacctgcctttaccaatacaacgccaaccttgtcgcctgcaccaagtacagatttaagcaacgccaatcagtttgcttattccagagcagtatcacaatttggattaaacggaagatttggtttcgccagattgagttttaagttctaagaccataatattggccacagattataaggattaaacggatttacgttgatctgataatcatattaatcccttaatctgtggctgttttttctagcgtaaagcctgcatttacaaggagtaataaaaattttacattaaatattgatatttaatttggtagttaggaaaatacttattacatttactctatagaattagtcgaattaaaaaagcattaattttaaatcaaataaaaatgaaaacaatagcaaatagtatgatgatgtgttgtgagatgatgcaaatgtgcatcccaaattgctgttaccaaaagtgaaagagtaaatctttgttatagttagaactataagcccttttggtcgccatccgaaagggcttttttaattccaaaactaaaacaagtatcatgaaaacactacatattatagtaagagagattttataccgattgaaaaccgattataaacgatttacagctgcagttaaaaatagaaaagtgaataccgctaaaataaaaggagagctttattcgagtgaatcaaattctctgcttttccaaatgtacctgcacgaagaagaagatctttttatttgagatataaaaacgactgtaataattaaagaataaaccaaaagctataaacaatacctaaaactaagaaatcatgagcacacaaaaatttgccacaaatgcgctacacgcgggacacgatgttactaaaaatgcaggaaccagagcagttccaatttaccagacatcatcgtatgtttttaacaattcagatcatgcagctaatttatttggtcttgctgaagccggattcatttacacccgattaaacaaccctacaaatgatgttttggaacaacgccttgcggcgcttgaaggtggaattggggcagtagttacagcctcaggagcctctgcaatttccacatctttattgactttgctaaaagcaggagatcatatagtggcttctaatagtttgtacggaggaacgtataatttattgagcgtaactttaccgcgtttagggatcacaactacctttgtagatccttcaaaacccgaaaatttcactaaagctgccaaagaaaacacacgggcattttttgttgaatctttaggaaacccaaaattagatgtactcgatctgaaagcgattgcagtggaggctaaaaaatttaaggttccttttattgtagacaatacagtagctactccttatttattaaatccgattgcttacggagcagatattgtcattcactcccttaccaaatatatttcaggaaacggaacctcattaggaggggccattatcgacgccggaacttttgactgggcgaatggtaaatttcctgagttcacagagccttcaccgggatatcatggtttagtgtatcacgaagctttaggaaatgccgctttcattgctaaagccagaatcgaaggattacgtgattttggagcagctttgagtccgtttaatgctttccagatcattcagggattagaaaccctgccaattcgaattcaaaaacacagcgaaaatgctttggctttggcttcctggttagaaaaacaggaagaagtagcctgggtgaactatccgggcttaaaaaacaataagtattatgacttgtcacagcagtacttgccaaaagggcaaagtggtgttgttacctttggattaaaaggaggttttgaagcagccaaaaaagtggtagatgaaacccagctcttctcgcttctggccaacattggtgataccaagtcattaatcattcatcctgcaagtacaacgcatcagcaattgtctgatgccgaacaattagaaacgggagtttcaaaagatctggttcgactttccgttggattggaagatatagaagatttaattgctgacttgcaaacagtttttgcaagcgtgaccgagtcacaatacagcattaataaaaactaggtttttttgttttttgtttgaaaaattgcctttagcagcgtgagttctgctagaggtgattttttataaaaagcaaatcagtataaaagttttaaaccttataggtgttgaggtttaatgtagagtgctacagtgtacttaaaatagttataaggtttaaaaattaaaaagtaaaattatgtcaaagcttaaaataaatatcatcctttttggaattggaaatatagggagtactttgatcaatcaaattattgaaagtcaggagttttttctcaaaagtaagaatatcgattttcactttccaattatcaccaattcaactgtagcttttttcgagaaagaaggcgtaggatatgcttgggaaaccaattttctggaattggccgttccttttaaggttcaggatattattgaatttgccaaagaaaatgaatttgaaaatttaatcgctgtagatgccactgcgagcgatgaattaatacatcactacaatacattgatcgaaaacgggtttaatattgtagcggtaaataaaaaagccaatacattgccgattgatttatacaaagagatcaggtcaaaccttaaaaagtacgacaaagagtttttgtatgaaacctcagtagataccggattcccggttttacaaactttgagagacttgtattattcaggcgaaaaaatcacaaagattcgtggtgttttttcagataatctgagttatgtttttaatcgctttgctgccgaagaagccaccttctcttctttattaaaagatgcgagtttactcggtttaatgcgttccacctttaaagaagatttatccggaaatgatacagccagaaaattactgattctcacgagagaaattggaaaagattttgagctgtcagatataaaaattaattcccttattaatgaagagcatctggagcaaaacggcattctgaataaagaagcaattgatcgatcgtttaagattgctaaaattagtcaggcagatgatcatgtactgcgatacgtgggagaatttgatgttgtaaaaaacacattagaagtcaaactggtttcagaacctattacttcagcaataggtcagctgaaaggatcagatactattttcgaaatttatacacaatcgtatgcagctgttccaattgtgattcaaagtgcttcggcctgtaagcaagccatttcaaggggggtaattacagatattttgaaagtagctgaaaagatcaaaaataaagaggcagtctggttgtaagtggtgtcgaaatactagtaagttgttctttgatataatgaaacaggaaagttttttaagttattttttgtaagatttatcttttaaatattgatatgttaattttgtaagatgttttttaacctaaaaaggtcgctttttaacgttttttgggattaatttattgagtctcacttgcataattgataaaatattcgcaaatttgtaagacttcaaaactaaagaagaaataatttagtattctgaatgaaagttacatcgattgaggcaaaagttttgtactctgttgatttaaagaagagtaaaatagaaatatttctaaagtttaaagaagtttattaaaatagaaaaaatgcaagaattttttaaaatagtaattaagtcccagatgaataagtccctacagatgaacaagatgtttaacgtcgcacgtatttgtgtatgcgtctgttgatactaaaagtatatatgagttgtaaaaaacttgaacccttttggtattacaaatccaaaagggtttttttattccatttggttacgataacaaagaaataaacataaaataaagataataacacgcaaactaacataaacttaaatgtcatgagcacaataaactacctaacaaagactttttcaacattgaaaaacattagagctaaaagaaacaatgcaccgccaacaaatgaattgaccgattcaagattcggggtgactgaaacaaataaaaaagcggagaaaaaaaatccggattcattattgtttttgatgtattcaaaagaaaatgaaacgctttttatttaaatctaaaagcatcataaaatagagggaaacctgcttaattttactgggcaaattgttcggtaattttttgcgtacactagtttttgtttgaattatgtttaagaaattgaggaatcagtttcgataaaatttgtttgtttgagaaattagtagttaatttgcacctttaagttcaaaaacgtattgaaatgttataaagaaaggacgagggattagacccgatgaatccttagcaacccttcgttaaatcgaagaaggtgctgcattctaccacccctaaacgtggaaagataacaacaagaaattttctggtttcactctagactttctttctaatatttccacatacaaatcaaaattaaaaagatttgaaattggaaaatataccaagtcccattataattcaggaattcatcaccgaaagtggtgtgtcctactcatcattacccttaagttttacactttccggtttaccattgtatagtgcgcctattgttctcgttaatcatgctttgacaggaaatgcagaggtcaccggagcaaacggctggtggaatgaccttattggggaagagaaaacaatcgatacccataaatttaccgtactggcttttaatgtaccaggaaacgggaatgattcttttattatcgaaaattatcaggatttcactaccagagatattgcccgtatttttataaaaggtttagaacttctaaatattagccaactacatactattattggtggttctgttggaggaggcatcgcctgggaaatccttgcattagaacctaacattactcaaaacctgattcccattgcaacggattggaagtcgaccgactggatgatcgccaattgctatttacaagagcaaattttgaacaattcttcaaaacctatcgaagatgccagaattcatgctatgttgtgttacaggtctccggaatcatttaaagagaaatttcaacgtaccatcaataccaaccgtcctgtttttaacattgaaagctggttggcccatcatggtgaaaaactacagaaaagatatcaattggcttcgtataaattgatgaaccaattgcttaaaaccatagacatcaccagaaacagagaggatttcgagactttgttatccaaaacagacgctgcgattcatattatcggaatcaattcggatttgttttttatacccaaagaaaatcgggagacttttcaggaattaaaaaagttcaaagacaatgtttcttatagcgaaatagattcggttcacggacatgacgcttttttaatcgagtacaaacaattagatcatttacttgccgatatttttaaggcagaaacaatagaaaaataaaatgaaaatattaaaatttggcggtaaatcgttatcaaacggagaaggacttaataaagtagtttcaattattacggataaagtacagcagaatgaaaaaatagctgttgtggtttcggcccgcggaaatgcaacagacgagttagaatacattttaaaaattgctgcgaaaaacggtaattataaacccttatttgagaattttaaagcgtatcaggtttcagattatcctcaggtcgatttatcggaagaatttaatgtgctcgagaaactttttgaaggagtaagcctgattggtgattacagcaataaaattaaagatcagattttatcaaaaggagaattactttcggctaaattgctgacggccattttaatcgaaaaaggtgttcctgcaaattttgtagattcaagagaattgttgaaaaccgattctaaatttggtgacgcacagcctttggagcagctctctaagaaaaatgtgatcaattattttaaagaacacaacggatcaacggttaacatcgtgaccggttttattgggtctaacaataataacgataccactactttaggtagaaatggcagtaactataccgcgtcgctaattgcaaattacctgaatgctgaagaattgcagaattttacgcatgttgacggaatttacacagcaaaccctgatttggttgccgatgcgaaaaaaattgaatttctatcgtttaatgaagccaatgaactagccaattttggcgctaccattttgcatgcgaaaacaatcattccgttactggaaaaaaatatcccgcttcgtattttaaatacctttaatcacgaaaatcgtgggactttaattacctctgattcagccaaagaaggaattaaaacgctttctgttttagagaatgtgtcgctggtgaatctggaaggccgcggattattggggaaatcgggtgtagatgcccgaatttttaaagtaatgggcgatcataatatcagtgtgagtattatctcgcagggttcttcagagcgaggcattggtcttgtggtggcgaccgataaggctacattggcaatggttgaattagaaaaagagttcgaaaatgacttctattctaaagatgtaaatcaaattacggtaaccgataatgtttcggtaatttcgattatcggtcaggatttgagtacttttcataaaccatacacagcattaatcaaaaataaaattgttccgattttgttcaataacaccgttacgggtaaaaacgtgagtctggttgttaaaaaatcagagcttcataaagccttaaacgtaattcacggagagatttttggagtttccaaaaaaatcaatattgctattattggtcacggactagtgggaggaactttaatcaatcagattttagaatcgactgacgctatcgaaaaacgaaaagacgtgagactgaatgtttttgcaattgcgaattccaaaaaagtacttttagataaaaacggagtaagttcgaactggaaaacagacattgaaaaggaaggacttgcctataccattcaagatattattgcttatgcgaatcaacatcatttagaaaacctgattgcgattgataatacagccagtgcaaaatttgttgagaattatattccgttggtggagagtagtttcgatctgatctcttctaacaaagtagcgaatacactcagttatggtttttataaagaattgagaaaatctttagccgaaaatcagaagaattatttgtacgaaaccaatgttggtgccggattgccattaattgatacgataaaattattacacctttcaggagaaaacatcacaaaaataaaaggagtgttctccggaacactaagttatttattcaataatttttcggcaaaagatgctccgtttagtgagattttgcaggaagcgattgataatggatacacagaaccggatccgcgtgaagatttatgcggaaatgatgtgggaagaaaattattgattctggcaagagaattagacttgcagaatgaatttgaagaaatctcgattcagaatttaattccggaacatttgcgtgaaggaaacgttggtgatttcttaacgaaattaaaagagtttgatccaatttatgaaaaaataaaagccgatcaaaagccaaaccacgtattgagatacattggtgaattgtcgggagatttgcaaaacgacaaaggaattttggaagtaaagctagtttcagtgccttctgataccgctttgggcggattaaaaggatctgattctttctttgaaatttatacagagtcttacggagaccgtccaatcgtaatccagggagcaggtgcaggctctgcggtaacagcgagaggagtatttggtgatattttgagattgtcagataaagggtaaagaatttgagattgtagatttgagattgcagatttataggtccagtttgtcatttcgaccgaagggagaaattacaccaggaactccgcaacgaaacattctaatctttgtcgacaatctaatgtgatttacttcgtctgttcgctatcgctcgagtcttcttaagtcgaaatgacaagattataaagaataaaaaataaaaaaaaaataacaacacaatgaaagtaactttgaacagagtaaatgacgcgtttcattttaaacttaaaaacgaacgtggtcatatagtggatgttgacagcagagccgaatttggcggaagtgatttaggtccaagcccaatggaattagtattgatgggggttgcgggatgcagtgctattgatatgatttcgatcctaaaaaaacaacgtcaggaaatcacttcctttaacgctgaggtagaaggagagcgtgtacaagttggtgaagcaaagccttttaaagaaatcaatgtggttttttatttagagggagatattaaccctgaaaaagcacaacgcgcagcccagctttcttttgagaaatattgctccgtttctaaaacaattgagcctacagctaccataaaatataaagttgtattgaacgacgaagaattaaagtaattggataattagtcaatttgataatttgataatttttggaccatttttatataatcaaaattcacattgaacttatggcgaaacgctgtgttttgctttgtgaatctttgtgaaattttataaaagaaagcgaatttgtgctaatcagtgtaattcgtgttttagccaatttgagaattagataactttcaaaatgaagattaattaataacgttataccgtttaaattttaagtttttgttttaaataatgctgaaaacttgaaacttgaaacaagaaaaacaaaaaaaatgaacacagaagaatttggttttgaaacacaggccattagaacacaattagaaagaagtcagtatttagagcattcggtgccattatacttatcatcaagttttgtatttgaagatgcagaagacatgcgagcttcttttacagaagaaaaagaaagaaacatttacagccgtttcagcaatccgaataccacagagtttgtggacaaaatttgtaaaatggaaggtgcagaggcgggctatgcttttgccaccggaatggcagcggtatattctacttttgcggccttattgaattcaggtgatcatattgtgtctgcgagcagtgtttttggttctacacatgctttgtttatgacgtattttccaaaatggaacatcgaaacctcttattttgatataacgaagccggaaacaatcgaaagcttcattaaaccgaatacaaaaattttatacgctgagtcgcctacaaatccgggtgttgatgtgattgatttacaattattgggggaccttgctaaaaagcacaacctgattttaattatcgataactgttttgctacgccttaccttcaacagcctataaagtttggagcgcatttggtagtgcattcggcaaccaaattgattgatggtcagggaagagttttaggaggagttacggttggaagcgaagatttaatcaggcagatttacttgttctccagaaatacgggaccggctttgtctccgtttaatgcgtgggttttgtcaaaaagtttagagacattggccgttcgcgttgaaaaacactgtgaaaatgctttaaaagtagcagagtttttagaggcgcatccaaatgtgaatagtataaaatatccgtttctgaaatcgcatccacaatatgaaattgccaaaaagcaaatgaaattgggaggaaatattatcgcttttgaaattaaaggcggaattgaagcaggaagaaaatttttagataaaataaaactgtgttccctatcggcaaatattggcgatacgagatcgatcgtaacgcatcctgcttcaacaacacacagcaagctgtctgaagaagatcaattggcagtcggaattacacaaggtcttgtgcgtgtttctgtaggtttagaaacggttgaagatgtaattgccgatttgaagcaggcgcttagttaaattttagattgcagattttagatattagatttttgaaaacggatatctaaaatcgtatcttttatatatggctaaacaaagactaatcattttatcagatttatttggaggcaaagatcccgagtggttaaaaatctatgtcgatttattaaaatctgaatttgaaattcagtattacgatgtgcttgaactagctggtattaatgctgataaccttgtggaaagcgatgttcataatcagcttcttagtgggggaatagatagggcaattgaagctttattgaaattagaaaatggtaaagtagcggttttaggatttagcattggaggaacaatcgcctggaaagcttctttacaaggattgaagattgtttgtctatttgctgtttcttcaacaagattgagatacgaaactgaagccccaaattgtagtataaaattatattttggagaagaagattcaaacagaccggattcacaatggttttttgaattgaatgtggtccataaaatgattaaaaaagagaatcatcagctatacagaacggaaaataatgcgttcttggtttgcaatgatattttgaaattttattaagatgatggcccttaactggaaaaaaaaacagttaaaggccattttttattgggttttatttaaactatactaatttagtagaatttaaattttcgttctattactattctcatttaaaaagtttatttttgtggcagaaaaacaagacgattgttgttttaggttagaagtctaaaataggcaatcagcaattaaaatagataaaacgtgctttcaaagaaaacaaaatacggaatcaaagctttaacctacctggccagacgtgaaaacaatgagccagtacaaattgctgaaattgcgaaaagtgaacatatttcgattaagtttttggaaagtattttgctgttgcttaggaactcaggatttcttggggctaaaaaaggaaaaggcggaggttattatctgataaaggatcctaaagatatcagtatggctaaagtctatcgtattctggaagggccaattgcgttgttgccttgtgccagtcataatttttatgaaagatgtgacgactgcgatgatgaatctacctgcgctgcacgccgattaatgaccgaagtgagagataatacacttaagatactggagagtaactcgttagcagatattgcattttaataagatctctattttgcgatttcctataaaaaagaccatttcaatattttaatgaaatggtcttttctttttagattcagattgtattttaaagaatataatacgtttagaaaattaatttatatcctgccataaaaagcattacagcaatcgcatttctaaggaattgatccggaacttttccactcagcatacttcccatataaattcccggaagcgagcccatcaataattgtcctagtaagacaagatctaaatttcccattgaagcgtgtccgattccggcaactagtgtcaagggaacggcatgcgcaatttcagtcccgactaaacgaggggttggcagtaagggataaagaaaaaataaagtgacagttcctaaagctcccgcaccaattgaagttagagttacagtagcgcctaatagaacacctatagcaatagttagtgtgttttgagtagtactttcgctgtgaaatttatctccggcatgtttttgagagaattctaaaagtttctttttaaagataatagcaactgaagtaaataacaatgcccagcctaaactgtatttgataacatgatttatagtttcaatgtcggttttgatactgttcagaatccataaagtaatcaaagcggcaggaacacttccgagagtcagccagcccgtgattttccagttgatgttgccttttttgttgtgaacgaagactcctccggctttagtaaaagcagcataaagtaaatcggtaccaaccgctgttgttggtggtataccaaaccacaacaaaattggagtcatcaaagaaccgcctccaacacctgttaaccccactataaaacctactgctaaacctgcaattataagacctatttggaaatccatggataaatatttgtcgtaaaaataacaacatttttataattatcctatggatgtggtagactttaaaagtgatattttaaaaatgaagaaattttcgctcttatagttctgtaatacagttccgtatgttttttttagccgtttgacgattgatggaaattgatatagattccttttcgtaactattaaaatatggaggatgtaaaaaaatcaaatattgttttgatatttagaaataagtagtaattttgccattcaatctactaacccgatagggtaataggttttaaagctaaaacaagtcaaaggaatggaaaaggaacttaaaataaataccgcagcaattaaggctgatgtcacaattaaagaaagattgtgggttttggtaccggcagttttactgataggtttgttgacgactttgatctacaatcaccattcggaattttcatggaatgcatttgttgacggttttaatcaggaatttttagtattttttgccattggagtttttgcacagttggtggatgggactttaggaatgggatatggagcaacttctacatcatttttattagcatacggagttccgccggttattagcagtacagcggttcacgtttctgaaatgtttaccacgggagcatcggcactttctcaccaccgatttggaaatatcaataaaaaattggtcaaacatttattaattccaggggttttaggttcaataatgggagcttatttactatcggatgttattaacggagatattataaagccttttattgcagtttatatgattgttttggctattataattattcgaaaagctttagttaaaaagatcatcaaaaagaaaactaaaaaattaggatttctggccatctttggaggttttatggattctgttggaggcggaggctgggggccgattgtgacttcaacattattaggaagaggcagaaacccgagatacactataggttctgtaaatgcagctgaatttgcaatttcattcgcaagcggtataacctttatgctttttggtggaatccacggttggcaggttattataggtttgattttaggaggtgtaattgcagcgccattgggagcttatcttttaaataaaatcaaaagaaaaccaatgatgattgcagttggagttttaattatactattgagtttaaaaacattatctaaattattgtaacattttttagaaggaaagaaagagaatatgagtgcgacgattatacaatcattattagataaaacgaaagatttttcacttgacgaaacattggctttcttagcaaatgaatatccgggaaaagtaattttttcgacatcttttggacaggaagatcaggttattactgatttcatagccaaaagcaatcaggatatagccatttttacactagataccggaagattatttcaggaaacctatgatgtttttcataaaacattaaaaaaatacaaaaagccaattgaggtttatttcccggaagcagcagccatagagagtttacttcagtcaaaggggccgaatagtttttatgattcggttgagaacagaaaagaatgctgttttattcgaaaagtagttccgttacgaaaagctttagcaggaaattcggtttggattacaggtttaagagcagagcaatccgagaatagaaacgatttacaattgtttgaatacgacgggggttttgaaattataaagttcaatcccttgctgaaatggacattagaagaggttgaaacttatttgtccgaaaacaatgttcctcaaaatgctttgcacaaacaaggttttgtaagcatcggatgcgcaccctgtacgagagcaatttttccgggtgaagatatcagagccggaagatggtggtgggaatccagtcataaagaatgtggattgcatagcgctaaaaaagagtaagtagaagaaagaagctagaggcaagagaatagattaaagaataaagaatatagatttttgagttccgaaggaacgactcatattgtagcgtcgggtttcaacccgatgaagacgaaggaacgtcccagtattatagcgtcgggtttcaacccgatgaagaggaaggaacgacccatattgtagcgtcggattttaatccgatgggaatggaagaagaagatttagaatatatcgtcggagtttaacccgatggagagtaaagaaagtaaagaataatagtagaaagttttaggaaactcacgataaacaacaacctgaaactttaaacttgaaacaaaaaaacaaaatgagttcagtattaaaaacaaacgctttagagagcgaagcaatatatattttcagagaagtaatttcacagtttgataaaccggttttacttttttctggaggaaaagattcgataaccttagtgcgtttggcacaaaaagcattcttccctgccaaaatcccgtttcctcttttgcatgtagataccggacataattttccggaaactattgctttcagagacaaattggtagaagagttagggttagaattaatcgtacgtaatgttcaggatgctatcgacgaaggaaaagtggtagaagaaaccggtaaatattccagtagaaacagtttacagacgaccacacttttagatgcaattgaagaatttaagtttgatgcctgtatcggaggagcgcgtcgtgatgaagagaaggcaagagcgaaagagcgtattttttcagttcgtgacgatttcggtcaatgggatgaaaaaaatcagcgtccggaattatttgacattttgaacggaaaaatagagaatggtcaaaacgttcgtgttttcccaatttcaaattggacagaattagatgtatggagttatatcgagaaagaacatatcgaaattccatctatttatttctcacataaaagaaaagtttttttgagagacggtttgatctggtcacattctccttttgtgtaccaggaagaagacgaacaaatcgaagaaagaattgttcgttttagaaccgttggagatatgagctgtacagcagctgttgaatcttatgcagcaactatcgaagaagtagtaggagaaatcagaagctctacgatttctgaaagaggagccagaattgacgacaaacgttctgaggccgcaatggaaaagagaaaacaacaagggtatttttaattgataattgacaattgataattaaaaagtagaatcaagaaaacaaaaaaaaaacatacagcttgaaactttagttcaaaggaaatcaacttgaaacctgaaactaaatttttaaacctgaaacaaaataacatagaatggacgttttaaaaatagcaacagcaggaagtgtagatgacgggaaaagtactttgatcggaagattactgtacgataccaaatcattgacgacagataaaatcgaagcgatcgagaaaagcagcaagcaaaaaggatacgattatcttgatttttcactggcaactgacggattagtggcggagagagaacaaggaatcacaattgatgtggcacatatttatttctcgactgcaaagaaaagttacattattgccgatactccgggtcacgtagaatataccagaaatatggtaacgggagcttcaacttctcaggtttccattatcttaattgatgcgagaaaaggcgtaatcgaacaaacgtaccgtcacttttttatcaataatttattgagagtaaaagaggtgattgtggcgatcaataaaatggatttagtggattattcagaagacgttttcaataaaatcaaagccgatttccaagctctaaatgccaaaagtactttcaaggagcaaaacgtaagttacattccgttaagtgccatcaacggaggaaatgttgtggacaaatcagaaaacatgaagtggtacgatggacaaacggtgttggagcatttagaaggattacattctcatgatgtttacgagccagggaaagcacgttttccggttcaaaccgttattcgtccaaagactgaagaataccacgactttagaggttatgccggtaaattatacggaaactcaataaaagtaggagatgctgtaacagtacttccttcattgacagaatcaaaagtttcaaaaattcactttttcgacaaacaatttgatgaagccgttgcaggttcttcgatcaccatcgaattagaaaatgatatcaatgtgacaagaggtgatatgattgtaaaatcatcagagcttccaaaaattgaaaaagaaatacacacaacagtatgctggatggacagtaaaaaactggttccgggtacaaaatatatcgttcagcacaataccaattcggttttagcaaaagtagaaagtattaaaaatacaattgcaacagattattcaggaacaacaccggcatcacagttagcaattaacgagataggagaagtaagcattaaattaagcaagcctttatattttgatgcctataatgacaataaatcaaacggtgcattcatcttaattgataccgcaacgaatacaacagcaggagtaggattcatcagatagttgagagtttgtggtttttagttgatagttctgctgtcaacaacctaactataaacaaccaacaataaactacaaactaagagaaatggaaagttttagaacagaaatagaaaatccggtagttcagaaagagattatcgatttagaaaaaaagattcatttgttccgtggaggaaaaattgatgatgagcgttttcgtagtcttcgtttagcacgtggaatctatggacaacgtcaggaaggtgttcaaatgattcgtattaaattgccttatggtaaagtaaccagcgaacaattgatccgtattacaaaagtttctgatgaatattctacagggcgtctccacattacaacacgtcaggacattcagattcactatgtaagtctggacagaactccggaactttgggcaaatctggccaaagacgatgttactttgcgtgaagcttgtggtaacactgttcgaaatattacaggaagcgaattggcaggtgtggatgtaaacgaaccgtttgacgtttcgccttatgcacatgctctatttcaatatcttttaagaaaccctatctgtcaggaaatgggacgtaaatttaaaatttcgttctcgtcctctgatgaagataccgctttgagttatttacatgatttaggatttattccaaaaattgtaaatggtgagcgtggtttcaaaatcatgtttggtggaggtttaggttctcagcctgctcatgccgaattactttccgaattcgttccggcaaatcagatcattccaacagcagaaggaatcgttcgtatttttgatcgatacggtgaacgtgctaaaagaatgaaagcccgtatgaaattcctgatcaaagaaatgggaagagatgttttccttgatctggttgaaaaagagaaaaaagcaatcgcttttgaaacgtacgaaattgacaccacagcttttgacggatcaattccggaaccgttattagaagtgccacaagttgccattgaagatcaggcagcatacgaagcctggaaaaaatcaaatgtaattgctcaaaagcaggaaggttattatgctattggaatcaaagttttattaggagatttttacaccgataaagcccgattattagccgatttaattaaaaattacgccgcaaatgaacttcgtttttcattgcgtcagaatattgtaatacgtcatgtgaaagaagcgaatttacctttcttctatcaggaattggctaagctgaactttgttcatttaggatataattcaacggcagatattacagcatgtccgggtacagatacttgcaatttggggattgcaagtagtaccggaattgcagaagaattagaaaaagtattaagtgctgaatatcctcaatatttaaacaatcgtgaaattgaaatcaaaatcagtggttgtatgaatgcttgtgggcagcataatatgtcggcaattggtttccagggaatgtcaatcaattccggaaaattggtagctccggctttacaggttttgttaggcggaggaagattaggaaacggagccggtcgttttgccgataaagtaattaaagtacctagtcgtagaggtccggatgcgttgcgtacgatcttaaatgattttgataccaatggaagcggacaaaagtttctggattattatgatacaaaaggcgagaaatatttctatgaaatcttaaaaccttacgctgatgtaaccaatttaacagaagctgatttcgtagattggggtaatgcagacaattatgtaaaagcagttggagttggagaatgtgccggagtggtaattgatttggtggcgaccttattgttagaagccaaagacaaattaacattcgcacaggaatctttcgacgaaaataaatggtcagatgctatttaccatgcttacgccggatttgtaaacggtgcaaaagctttattgctttctgaaaacgaaaaaacaaacaatcatgcaggaatcgttgatttgtttgataccgttttcattgcaaccggtaaaattgaactggcaacatcattcagagaattagtgtatcaaatcaatgcaatacaaccttcagaagcatttgcaaaacaatacattcaggaaggaattgcattttttgatacgatagaaaaatatagagctcaacaattagaaaatgcttaatatcaaaccaaaagtaactttagttggtgcgggtcccggtgatccggatttgcttacgctgaaagcggtaaaagcacttgctggagcgaatgtggttttgtatgatgcattggccaatgaagagatattagcccacgctcctaaaaatgcgattcggatttttgttggaaaaaaaataggcaatcatgcttacacgcaggatcagatcaatcaattgattgtggataatgctttgacctacggaaatgtagtccgtttaaaaggtggtgatccgtttatttttggacgtggaagtgaagaaattgaattcatcgaaagttttggaatcgagacgttcgtggttcccggaatatcttcggtagtggcagttccggcaagccaaggcatatcaatcaccaaaagaggggtttccgaaagtttttgggccataacaggtacaacttctgacaggaaattatcttcagacgttgctttagctgcacagtcctctgcaacagtcgtaattttgatggggatgcacaagctgcctcagattattgatttgtttcaaaaagaaaacaaaggaaatttgcccgttgcgatcattcaaaatggaacaatgcccgatgaaaaagtgggtgtaggaacggtaaattcgattctggaaattgtagaagagaagaaactgagttcgccggcaattattgtacttggagaagttgttcgcgaaagcaataaactaaaaggatttttcgaagaatttctgtccaaagaaatgatgagataaagtgccgtaaaaatgattcctcacataatcttgattttcagtcggtaaaatgtcttgggtataaaattgggtttttagcctgatgaaagcaaaaaatcatctaattttgattggatgaaattgaattaaaatggaacaaaacgaattatatcctgtattcctgaagcttcataatctaaatgttctgattgttggcggaggaaatgtaggattggaaaagctctcttttttattaaagtcgagtcccaatgcaaatgttgaggtggtagcgccaaattttcatttagaaataaaggttttggctgagaaacatccttcgattacattgacaaaatcgaagttcaaaaagaaaatgctcaaaaaacgccacatggtaattgcctgtaccgatgatttaaaagtcaataaaagggtatacgaattatcccgaaagcgttatttgatttgcaatattgcagatacaccggatttatgtgattattatttaggtggaatcgtaaccaaaggcaatgtgaaaattgccatttcgaccaacggaaaatcgccaacaacagccaaaagacttcgggagttttttgaagaggtaattccagaggatatcaataaaatggtcgaaaaccttaatgaatatcgaaagacattaaaaggtaattttgaagagaaagtgaaaagaatgaacgagatcacagcttcattgaaaaataaggaatagtaatagttccgaaagaacggttcgtatggtaacgtcgggttttaacccaatggataaacgaaataaccgcttcaataaaaaataaagagtaaaaaattccgcaaggaaatcaatgacaaaaatcattgaaattagaataaattattcgttcctttgcattattaagaatgattataaacaacaacataatgattaaaacagatatacttataattggagcaggcccaacaggattatttgccgttttcgaggcaggattattaaaattaaaatgtcatattttagatgctttaccacaggcgggaggacaactttcagaattgtatccaaaaaaacctatttatgatattcctggattccctgaagtattggcaggagatttaatcgacggactgatggagcaaatcaaacaatttgagcctggttttacgttaggagagcgtgcagaaacgattgagaaacaagaagacggaagttttattgtaacttcaaataagggaactaaatttcacgcaccggttattgctattgcaggaggtttgggaagttttgagccacgtaaaccacttattgaagatatcgagttttacgaggataaaggagtaaaatatttcatcaaaaatccggagaaattcagagacaaaaaagttgtaatcgccggaggaggagattcagccttggactggagtatctttttagcgaatgtagcttcagaagttactttaattcaccgtagaaatgaatttagaggagctttagattctgtagaaaaagtacaggaattgaagacagccggaaaaattaaattaatcacgccggcagaagtgatcggaatcaatggtgctgagcacgttgaatcattagatatcgaagaaaacggagcacaccgtaaaatcgaaacagactattttattccgcttttcggattaacacctaaattaggaccaatcggagactggggattagaaatcgagaaaaatgccattaaagtaaataatgcattagattaccaaactaatattccgggaatcttcgctattggagacgtaaatacttacccaggaaaattaaaactgattctttgtggattccatgaagctactttaatgtgtcaggccgcttatcaaatcatcaatccgggtaaaaaatacgttttaaaatacactacagtttcaggtgtagatggtttcgacggaactcgtaaagaagctccaaaagcagttgttaaggcgatagtttaattctaaggggctgaggtactgaggtgctaaggttctaagattttatatagagaaagctcgaacttttagtttgggctttttttatttgtatctttgtaattataaattttgagtatcatggatttagaggctagaaaatatcaatttattcagaaattgtttaaggtggaagatgagagtgttttagagaaactagaattggttttgaaagcaaatcaagatgattggtttgatgaattatcagaattggagaaaaatgaaattcaaattggattagaccaagccgagaaaggtgaatttataagccatgaagatgtcatgaaaaggttttcgaaatggcattaaaatttatttggacttcccaagctgtaaaaggctttaataaagttgtcgattatcttgaagcgaaatggacggcaaaagaaatctcaaatttagaaaataaaattcagcaagtactaaatcaaatcagtctgaatccggaacaatttccaaaatctgaaaaatacagttcactacataaagcaattgtagacaaaaataattatttagtttaccgcgtaaataaggaagctaatactgttgaaattatcaattttagaggaacaaagcagaagcgcaattactaagcaaacttaaacttagaaactcagtatcttagagccttagtttctaagtaccttaaaaagaaccttagcatctcagaaactttaaaaaacacttgcaattgttgagactatgtctttactttgcactgttcttaaaattattgaaagttatcacgaaaggcggagggaaagacccaatgaaaccttagcaaccctttatcataaagaaggtgctacattctacttaatacaacatctttgtattcaagatagataacacaaatacattacacgtatttctcaaacttttcctgacaatcttacaatattattttactgaattcagtatcatgagcgaatcattaacgcatttttttgtgcttaatctttcctgctttttgttgcgaactttttagatctgacagctttatttaaactgttggatttaaagtgaaaatagaattaataaaaaaacttagcatcgtagaacctcagtgtcttagtggctaaaagaataaagatatgtcaataacaattcaggaagcaataaaaaaaaatatcctaatccttgacggagcaatgggaacgatgttgcagcgctataatttctcggaagaagattttagaggagagcgtttcaaagattttccgcatccgttaaaaggaaacaacgatttactatccataacacaaccacaagcaatccgcgatgtccatgccgcttattttgaagctggtgcagacatcgtagaaaccaatactttttcaggaactacgatcggtatggccgactatttcctggaagatttggtttatgaactgaactacgaatcggcgaaaattgcccgtgaagtagcggatgaattcactgctaaaaatccggacaaaccacgtttcgtagcgggttctatcggaccaacaaaccgtacggcaagtatgtcaccggacgtaaacgacccggggtacagagctgtaacgtttgatgatttgcgaattgcctacaaacaacaggcagaagccttaatggacggtggatgtgatttacttttggtagaaaccatctttgatacgctaaatgccaaagcggcactttttgccatcgaagaagtaaaagaagaacgcaatctggatattccagtcatggtttcaggaaccatcaccgatgcttcgggaagaacactttcaggacagacggttgaagcattcctgatttcagtatcacatattccgttattgagtgtagggttcaattgtgctttaggggccgatttgctaaaaccatacttgaaaaccttatcacagcatacacagtttaatgtttcggctcatccaaatgcaggtctgccaaacgctttcgggcaatatgatgaaactccggaacagacacaagccttaatcaaagaatacttagacgataacttaatcaatattattggaggctgttgcggaactactccagatcatattcgattaattgctgaggtggcgaaggactataaaccgagagtagcgccggttttgggataagatggttgaaaaaacaacattggcggatctaagcgaatggggaaaaataattgttcccttgacgataattggggtattattcttttctataagaaactccaatattgagaatgagaaatttaaaaagcggcttacagaagaaacgatcggattatcgaccagaatagaataccacaataaaacacgtggtttgaaatactatttttatgtgaacaaaaagattatatcagaatgttcattaagaagtgaagactatgataaagatttatcgggcaagttttataagataaaatataatccgaataatccggaagagaatgagcttattctggatggagaattgttaccggattcactttcgcttgttaaagcgggctttgtaaaaactaaatattatatatatgatgcaggtgtaacctgcaaatacatagaaaaatcaaaatggaaataaatgttccgttaggaacaacatatcggtaacgaatatacctacaagtttttaaaaaccttataggagaccaataagaatagaaaactcagaacctaagaatcttaggaacttagtaccttaagaaaaatgacagaaaatagaagagaccttgtattatcaggattagaaccgttaattattacaccaaccagtgtttttgtgaacattggtgagcgtacgaatgtgacgggttcaagaaaattcctgcgtttaatcaaggaagagaaatatgatgaggcacttgatatcgcaaggcagcaagtagagggaggagcacagatcatcgatattaatatggatgagggaatgcttgacggagttcaggcaatgactaaatttttgaatttaattgcatcagaaccggacatttcgagagtgcctattatgatcgacagttcgaaatgggaaatcattgaagcgggtcttaaagtagtacaggggaaaagtgttgtaaactcgatttcattaaaagaaggagaagaagcctttatccatcatgctaaattaatcaagcgttacggtgctgcagccataatcatggcttttgatgaagtaggtcaggctgataattatgaccgaagagttgaaatttgtcagcgttcgtatgatatcttagtgaacaaagttgattttcctccacaggatatcatttttgatttgaatatttttccggttgcgaccggaatggaagaacaccgtttgaatgctctggatttcttcagaggaacaaaatgggttcgcgataatttgcctcatgcgcatattagtgggggagtaagtaatgtttcgttttctttcagaggaaacgataccgttcgtgaggcgatgcactcggtatttttgtaccatgcgatcaagaacggaatgacgatgggaatcgtgaatccggaaatgctttcgatttacgacgatattccaaaagatttactggaacacgttgaagacgtaattctggacagacgtgacgatgcaaccgaacgacttttagattttgccgagaacgtaaaaggagaagtaaaatcagatgaaaaagcaattcaggaatggcgtttgggaaccgttcaggagcgtattacgcactcattggttaaaggagtggatgcttttattgaagaagatgtagaagaagcacgtttggctgctacaaaaccaattgaggtaatcgaaatcaatttgatgaccggaatgaatgtcgtgggagatttgttcggaagcggaaaaatgttcctgccacaggtagtaaaatcggcgcgtgtaatgaaaaaagccgtagcctatttattgccttatatcgaagcgagtaaacaagcgggagacaagcaaggaaacggaaaaatcctgatggctactgtaaaaggagatgttcacgatattggtaaaaacattgtttcggtagttttagcctgtaacaattacgagattgtagatcttggagttatggtgcctccggagaaaattattgccgctgcgatagaacacaatgtagatatcattggtctaagcggattgattacaccttcgcttgacgaaatggtgtatttggccaaagaattagacaaacaaggaattaaaattccgattatgattggtggagcaaccacttcaagggcgcatacagctgtgaaaattgcaccacaatacagagaaacggttattcacgtaaacgatgcttcgagagcggttactgttgccggaaatctgttagatcataaccgtaaaatatatgcaagcgatattcgtgcagagtacgattcttttagagaaacatttttgaatcgttcgagagataagaatttcttaagcattgaagatgcgcgtaaaaacaaattacaattggattgggaaaatttcaatccggtgaagccaaatatcattggggaacaaattgttgaagtagagctggatgttttggttccgtatattgactggacaccgtttttcagaacctgggaattgtttggtaaatatccggcaatattaaccgatgaggttgtagggaaagaagcgacttctgtttttgaagatgcacaggcgatgctgaaagtaattttagcagagaaaaaactatctgcaaaagggatctacggaatatttccggccaatcagatcaacgatgatgatatcgaattgacagatgaaaacggaaaaccgttacagacctttttgactttacgccagcaatcgcaaaaaacaaaaggtgcgccaaatattgcattagccgattttatcgctccgaaagaaagcgggaaagtggattatatgggagcattctgtgtaacaaccggttttggtgttgatgaatgggcagctgaatttgaaaaagatctggacgattacaattcgattatggtcaaagcattagcggatcgttttgccgaggctttcgctgaatatcttcatgaaaaaatacgtaaagaaatctgggggtattcatcagaggagagtttaactaacgaagaaatgatttctgaagagtacaaaggaatccgtcctgctccgggttatccggcatgtcctgaccatttggagaaaccaacaatctggaaacttttaaatgtagaaaaagaaataggtgtaacactaaccgaaagcatggcgatgtggccggcttcatccgtttcaggatactattttggaaatccggaaagtaaatatttcggactggggaaaataaaagaggatcaggtagtcgactatgccaaacgacgcagtgtttcaaccgactatgccatgaaatggttgaaccctaatatagcagattaaaatagagtcataaagtcaaaagtcttaaagtctccaagaaagtgactttcgactttggacattaagactttagactaaaagaatatttgatttatgttttttgattcagattttttacaccattttccaaaactcataactcataactcataattaaaaaatgaaagtaacagaacatatagaaaacgcgaagggaaatacattattctcgtttgaacttattccgcctcaaaaagggaagagcattcaggaattgtatgataatattgatccgttgatggaatttaaaccgccatttattgatgtcaccacttcgcgtgaagaatatatctatattgataaaggaaacggactgttagataaaaagctaacgcgtatgcgtccgggaacgcttggaatttgtgcttctataaaacacaaatacaatgttgatacggtgccacatttgctttgcggaggatttacgcaggaagaaaccgaatacatgctggtagattgtcagtatttaggaatcaataatgtaatggcacttcgcggtgacgctatgaaagacgaacaatcttttgtgccaaaagccggtgggaatagttacgctattgatttggtgcgtcagatcaataatttaaacagcggaaaataccttcatgaattaatggatgctgataataaagccgatttttgtataggtgttgcggggtatcctgaaaaacacctcgaatctccttctttgcaatctgatctaaaaagactgaaagaaaaagtagatgcaggagcggattatgtcgtgacccaaatgttttttgataatgctaaatattttgcctttgtagaaaaagcaagagaaattggcatcacaattccgattattcccggaatcaagcccattgcggttcaaagacatttacagattttacctcagatttttagaatcgatttgccggaggatttaattgatgctgtagataaatgtaaaaacaatgccgaaatcaagcaggtcggaatcgagtgggccgttcagcaatcattagaattaaaggctgcgggagttcctgttttgcattattactcaatggggaaatcagagaatatccgccagattgcaaggcagattttttaagactttaagcatatggtttgtcctttcgacccaagggagaaatcacactcgctaatcgacaaagattggtactttgttttgcggagctaatagtgcgatttgctccccctattcgctattgctcgagtctcctttcgctcgaaaggacaaaattttaccgataattactttttaggattaattttgaatttattttaaagatgatgaaaaaagaagaattacaggcaatagccgctcagctaaagcatcctacaggagaaaaaggaatagaaatggcgaatatgatgcatgaaaccaacatcaatatgacgcgtcattccgttcaaaatctgcacgtaatatcgggaaatgcaattttagaattaggccacggaaatgccggacatttagagtatgtactagagcaggctcaggatctgacttactacggacttgaaatgtcggagttaatgtgtcaggaagcacaacaaattaatatcgcttttgtagctaaaaaacaggctcacttttctctttataacggaaccaatattccatttgaagaagcctcttttgataaaatattcacggtaaacaccatttacttttggcaggaaccggagaagttactctcagaaatttacagagttttaaaaccggaaggtactttttgcatcacctttgccgaagaaagttttatgaaacagcttccttttactcagttcgaattcaatctgtacagtactgaaaaagcggaaagtttgattgaaaaaacagctttccaagttgtgcataaagaaacactgactgaaaaagtaaaaagtaaaatgggtgagttggtagacagagcttttactactttggttttaggcaaacgttgatcccccaatcttcttcaccgtatttttttgcatattttcatagattccggaggaatttgactctttgggattaaaaattttcacagttaattttagtactctttttttgagtaatttaattgactttattttatgttgctatttcggaatgtaatccgctaaaattatggagattaaaaagatcgattttctaaaaagttacagcagtattctattgcttttgggaggaatcctgcttggaagtattttaggattggttttcaaagaaaaagtggaggttataaaacctcttggagatattttccttaacctgctctttacggccattatccctttaattttctttaccattgcgtcttcaattgccagtctggaaagaacagagaaattgggcaaactgtttgtaatcatggttctggtttttttaagcaccattttaatttcggcaattgtgatgattttagcagtatatctttttccaatccatcagaatattatagtgtctaaagtcccgatagaaaacatccaatcaggaagtattggcgagcaaatagcacagctggttaccgtaaatgatttctttgaattgctgtcccgaaaaagtatgctggcgcttattatcttttcttttttaataggttttgcgagtctgcaatccggagaaaaaggaagcgctttcagaagttttctggattccggtaacgaagtcatgaagcagcttttgaaccttattatgaaattagctccaattggtttgggggcttattttgcctatcaggttggagtttttggtccgcaattgtttggtgtttatgccaaacctttaggggtttattatgcggcctgtattttctatttctttgtgttttttagtttgtacgccttagtggccggagggaaaagagcttttgtggtattttggagcaataatatcacacccgctttaacggcggttggaacctgcagcagtattgccaccatccctgcgaatctggaagccgctgagaaaatgaacattcctaaacacgttcgcaatttggtcattccgcttggagcgcccttgcataaagacggttcaagtatgtcttctatccttaaaataaccgttctttttgccatgtttggaaaagattttacggcgccttcgaccctacttttagcgcttggaattaccgtaatcgtttcaattgtagaaggaggaattccaaatggaggttatattggagaagttctggccatcacagtttacggactgccaatggaacaagccctgccggttgccatgattttaggaactctcgtcgacccgatagcgactttgctaaatgtcaatggagatctcatttgttcgatggtggtctcgaggttttccgaaaaaacgaagtggtagcgggcttccttcatagcaaaaaaaaaaaaggacttaacctataggagcatcgattttaggatgtgaaatgtgaaaagaatgtctaaaagaaatacattctttttcatgccctttctgtgttttattaaaagtgaaacgacttaatttcaagcagaaagctatgtttctatgtgttaaaataaattatacccaacgaattaacttaaatactaaaatcagtgttaatctgcttaacctgtaaaatccgtgtgctaatttttagcagtaaggaagtcttacagctaggcataaaaaagtagtttacaatgaattcaatacttcaaaatgatctgaacgatcttgaaaacattctggaaaaagcaaaacagcacggaatagcgtttttggacaatcttgaaaacgttccaacttccagtaaaaacacaatggatccaacccgaaaactaaacgagaaaggcttagggtcattaggggctttggaagaatttaaggagagactggcgccattgatggtagcttctccggggccgaggtatttaggttttgttaccggaggatcaacgccagcttctattgtaggcgattggctgtctacagtttacgatcagaatacccaggcagttaaagcgcagggaggaacttcggccctaatcgagtttgaggccattcatttattgcgacagttattagagcttccggaatcttttttagggggatttgtgactggagcgaccatgtcaaattttacctgcttaggggtggctagacagtggattggtgcccagtcaggaaaagattttgctaaaaacggagtttccggagccataccgatcttaactgcgacacctcattcttcatccataaaaacactatcgatgctgggaattggaagtaataattatacggtacttaaaacagcagaaggcaatagagaagctattgatatcgacgacttgcagaagaatatagaaagtttaagtggagagccgtttatcctgatttcgagcgcgggaacggttaatacagccgattttgatgattttacagctattgcaaaacttagagaaaaatacaatttctggtggcatattgatgccgcttttggtggttttgcagcagtttccgaaaaattcaaacaccttacagatggctgggaaggtgcagacagtattacaattgattgccataaatggttaaacgtgccttatgaaagtgctttttatttaattaaaaaagagcatgttggactgcaaatcgagacgttccaaaattctaatgcgccttatttagggaatcctctggagaattttaactatctgaacgtattgcctgaaaattcacgccgattaagagctttaccggtttggttctctttattggcttacggaaaagaaggatttaaagacatcattgagaaaagtacggcattggcactgcattttgcaaacgcccttatcgaagatgagaacttcgaactgttggctccaatccgactgaataatgtttgttttacattaaaaggagaccataatcaggagcatgtaagtgcgtttttgacgcatttaaatgatacaggaaaggtgtttatgacgccaacggtttatcagaaccgaaaaggtattagagcgtcttttgtcaattggcgcactactgaaaatgatatcaaaataattatcgaagagataaaaaagactatttctgaattggatttttaattcgatagtttaaatttttaaagctcgattagatgctaatcgggcttttttttgcccttttttgaaaatttgaagtgcggtcagtttggattttttaattttcgcctcatgatttcttaaggaaagcttaagtaaaatttaattattctttaagaattgacttgtttgttatattttcttttggttaaaagttaattactattcttatttagaataattaaaaataacttggaaaaaaccttttgagagcctaattttgttgctaatttaattttcaaaccaaaatttattagatgcaaataagtagattaatgtccttgatcgtccttttttttatttcacttcaagggtattcacaaaaggacaaagtaaatttaacaggagttattgttaatcatcttgggaaaactgccgaaggagtttcggtagctttaaaaggaacagcatacagtacactgacgaataataaaggggagtataaaattagtgccaagccaggaaattatgttttgctggttacacatgtgggttataaaaccacagaaacggcaatttttctaaagctgggaggaaagcctactcaggatattacgatggaagaagatatggcagctttaaacgaagttgcagtaacaggaaagtccaaagttcaaagagtgcgagaacaggcatataatattacagccatagatttaaagaaaacctacaatacgtctgcggatttaaatcaggtgttgaataaaaccacaggagtccgcattcgggaatatggaggactgggatcggcttttaatttttcactgaatggtttctccgggaatcaggttaaattctttttagacggagtgcctatggacagttatggttcagctcttacactgaataatattccggtaaacatggctgaacgcattgatgtgtacaaaggtgttgttcctattgagttaggagcagatgcacttgggggagctgttaatatcgtgaccaacaaaaatgtaaaccgttacatcgatgcttcttatagttacggatcgtttaatactcacagagcagcaataaacacgagattctccggtcgtgatggttttattgccaatattaacgcttttgcaaattatgccgacaatgattataaggtagatgtaagtgtggtggataaaaatacctcgaagtttttaccggaacaaaaatacaagcacttccacgatgggtataaatcgggaacgataatggctgaagccggatttaaaaacaaaagttttgctgattatctgcttgttggttttgcggtagccggtaacaagaaggaaattcagcagggtaaaacaatgcaaactgccattggacaggcttttatggatagtgagagttttattacgtctttaaagtataaaaaagacaacctgtttacgaaagggttatctgtaaatattagttcgacttatgctttagtaaacagtcgttctatagatacctcgtcaagagtgtacgattggacaggaaactacgtatacaggcagttttcaggggctaatgacaaaggagaattgagtagtagcaaaacgctgtacatttatgatgaaacaaatgctcagttaacatcaaacttgaaatatcaattgagtgaacaacatatcgtaatgctaaattattcttatcaggactatagacgtaaacaatcaaacgaatatcttaaggttgttgatcttggcagaccagggattactaaaaatattttaggattaagttacaattttagcagtttggataataggttagccatttcagtttttggaaaaatatttgatttaggtactgagatgatttctaatagtataatccagtcttcatcatctacaaattacggttatggtgcaacttcggcttatcgtttatccgataaacttcaagtaaagggatcttatgaacatgcttatcgtttaccttcagctgaagaaatgttgggtaatggattaaccataattagtaacacaggattaaaacctgaaaatagtgacaatgttaatttaggtttagcttttcttactcaaaaaaagaacaatcaaattagcgccgaaacgagtttgatttacagggaagcaaaagattttataagagaacaagagttagttaacatttctgtttatgaaaatctggcaaatgttcaaataacgggggttgatggtgttctgagatacgcatacaaagacttcgtaaattttgaagtaaacggaacctatcaaaaaagcctaaacagaaacaaatttaaaaagggaacaaccagtcctgatgtattgtataatgcgcaattacccaacgttccaatcttctacgggaacgctgacctgacgtttaattttaaaaatatcaggtatcaggacgataaactttctttaaacgtaagtgccaattatatcgatgctttttacctgacatggccggtactgggaagtctggaaaccaaaaaagctattccggaacaatttacacaaaacgctatggttgcctattcttttttaaacggcaaatacaatttggctttcgaatgccgaaatattaccgacataaaggtatacgactattttaaggttcaaaaaccgggacgtgctttttcagtaaagttcagatactttctacagtaatttaaataataatcctaaataattataatcatgtttgtaaacaaattcgcaaaatgctttgcattggcttttctgtcatgctctatcttttcatgcagcagtgatgattcctctaaagatgaaacaccaactgtaaacggaactaaatatgtagcatcttactggctggccgattatacgcagtatatattagattttaattctactgatcagttaatgactggagaaattagtgcaaaaggagttggaattgagcagggaggaagttgttttcctgtgaacaatacattttttgctttaagtacagaagacgaagggtcggtatcgtttcgtctgaacaattccggaaagctgggagcgggagataagatttctttcgagtcatcgtatgctgtaggttatacagatgataaaaagctgatcaatattggtgctacctgggacggtagttcatctgattacgaattgatgatttacaaccctgctactgtttctatcgatgcccgtaagttcaacgattttagtgtgaatccaaccaataaaaaaatattatactggccaacaggagcggcagtgtcaggagataaactttttgttccggtgtataccaaagatgtaagcgacggaaccaataaagtattatcatctgatgctactatgagagtgtacaaatacccttctttagaatatgtaagcaccataaaagatgccagaacaactgcaattggtctttattataccaatactggaattgttcagacagaatcaggggatatttatacgttctcgtctaatgcacgtgcaggaggttatccggttacgggtgtttcatcaggagttttacgtgttagaaaaggcgatgccaagtttgacccgggttactttttcgatcttcagtcaagtacgttaaaagggaaagttcttgccgcttatcctttaggaggagagaaagttttcatctcctatatccctaccgaagttgacgctgccaattctgtgtacagcttccttaacacaaaaacaattttcaaatcggcaatattggatttatctgctaaaacaatcttagcagttacgggattgccggatcatggcggagatgaattcttcgggttgggaagtatgtttgtagagaacggaaaagcatacaaaagttttgtaacaggcgatcaggctcgtgtgtaccaaattgatattgtaaccggtactgcaaaagcgggtgcacttattaaagaaggtctttatttgccttcaattggtaaacttacctactaaattaccacatttttaagcggcttgaggattactaaaaatcctcaagccgttttatttataaattttgtcttagtttcaaattactattttaatgaatattattaaaaaccgcacgggtaaaccacccaataaaggaaaatcacgctttagtaaaatcaatgcctggctgcacttatggctgggactcgcttccggaataattgtatttatcatggcaattaccggctgtattttggtttttgaacacgaaatcaaagagtttacctctccctggctcaatgtcgaggctcaaagtcctgagcacttattacccccttctcaaatttatgcagcagttcaaaaagtactgcccaacaaagaaattcatggtttctggtataatggtttagacaaatcagttaaagttgatatcgaatcggattcgttgatttatgtaaacccctataacggtaaaattaccgggatggtcgatcatgaagatttctttcacataatcgatgaaggacatcggaatctttggctggagcgggatattggagcacagataaccgcctgggcaacctttattttcttctttttattgattagcggactactattgtggtttccgaaaaagtggaacaaaacaaccattaacagcagttttaaaataaagtgggaggctaagttcaaacgcctcaattatgatttgcacaatgtaatggggttttatgtgctcattttggcagtattgatttcttttaccggattgttaatgagttttcattggctaagagaaagtacctactggattagtggaggatgggcagaggtaaaagagcagaccgtttcggttaaaaaagagcccttgtccaaagaacaattagacaaactgactgctgtagattttatttggaaaaaggttcggacggaaattgccaaagaaaacaaagaagcggttatcattcattttcccgatgatccgaaagaagatttttacgcctgtacggacatgtacaaaggtatttggagagatctgtattttgactccaaaacgcttgaattacttccaaaatcagaaaaatatattggtaatgagcgtttttcagattggttgatgcgatccaattacagccttcatattggtgcaataggaggattgtcgaccaaaataatttatttcatcggcagtttaatctgcgccagtttaccaattaccggattttacatctggtggggcagaaagaaaaagcaaaaatcaaaagcttagtgttgatttgattttagccgttttgtattagttagtttccttaaagtcttttgtgtgaagtgaaattcctcaaaagacttttttttggctttgtcggacttcgacttcgctcagtctgacacgtcaggcaaagcgaagttgttttttttgtatgcaggattactttttttgggggactttggcttcgctcagtctgacacgtcaggcaaagcgaagttgtttttttgtatgcaggatcacttttttttggggacttcggcttcgctcagtctgacgaagttttcaatattattttcaaggtccttttatttgtggcagtgtgctgcaggagaaatatagatttaagatttttgattaatgatttttgatctgtcgatggtcaatagtgaaatggtcaattttgtacagctctaaacatctgaaatcaaaaaacgttaatcttcattctgaaattttgtggcattatgacattttccgaagtttgtgggtgtggctttatgggacatttacaattagaaaataaaaagagcctgctaactacaaacaggctctttcattcaaaaaaaaaacaaaaacaaggaaactaaagatccaaatattaaattctgtacgtaaaggctatagtagcaatacggttgtccagatcatatcttttattgatgctcgtttgagctatgactgaattgatgtgaaaattattggtattaaaaatgtccgtaatattaaatttgatacttcctttcttagccagtacctgtttcgagattccaatactaaaatcaaaaaaagcatctctttcataaataccaagattcgatctggattgatattgtgcgttagcttcagctttcaggctttcggtgatcgtaaaagagttctgaacacttaagtttaaagtgacaataggattaattttatccatattgaccacattccccataaacttattctcgaaaatgttgaatagtgtattaacagaccaccatttgtaaatttcggctgtgttggtaatattcacaccataattaaaggatttgctcacgttaatttgggaagttacagtagtgttgttggcgggattgtaatcgtaaacctctgtaaaaacatctttggttttactgaaatacaacgaagccataaaagcacttttccaggcgtatccaatttctgtcgaatgtgtaatctcaggaaccaaattcggatttccctgtgaataattaaaagaatcatcgtaaaaacgaaacggatttaaatcaaactgactcggtctgttgattcttttactataagacgcatgtagagaatgattgctgttcaactcgtattttaaagaaacacttggaaaccattttaaataatcgtctttgtgggtttcatttaaggttttttgtagtatctcaatcgcagtatattctgttcttaatcctccctgaatatttagattttccagttggtatttgtaattggcgtaggcagcataaatttgttctttgtactcaaaatgattggttgagttaggatcaacgatccactgattattgtcgtaatactcgtaaactgatggattgtcattgtttttaacgctggctttagcgccccattcgatagactgcttttcctttaacggattgacgaaatcaatttttcctgtaaaaacactcaattgcgacggaatgaaccccctgcgatcattaatgttagctgcaatagctggatctatattttttgcactctgaaactgattcgatctgaactttgacgtttcatactcgaaatcaaaagacatgtttttgccctcggtattaaatttatgaactcctgaaaaaccataggtataatcattccacttttctttactgtcgttgaaggttaaagcatcaaattgcagctgatttgaagcatttagcagtgtatttcttccgttagcaatgttctcgtaacgccccagtttggcatcgacatacacttctaaattcgttttaggagaaacttcgtaggtagttccaattttaaaattattagaagtcagcggttcgtctgtaaccgaggtctgatggttttttgttgaaatagtctgacgtgtattatcagtatattgaatctgatcgaattctttacgttcttcctcacctctaaaagtgtaactgtaatttccgtaaacgccaaatttttctttgttgtagcttaaattaacccctgaattggttctgttcttacgggctcttccgtagttggtgaataccgttcctttaagtcctcccgcattaggtttctttaaaataatattaataattccggctttaccggtcgcatcatatttagaagaaggattcgtaatcacttcaatttgtttgatattggatgaggtagttgactttaaataattggcaagttccttttgcgaaagctgtgttaacttgccattaatcatcactccgacaccttgttgtccgcgaatcgataattcgccgtcctgagaaacgacaacgcccggagcacgggataaaacgtctaaagcagtgccgccttcagaaacaatgctgttttctacattaaaaaccagtcgatctgatttctgagtatataaaaccttcttttttgtgattacaatttcatctaaagcattgatcgaggtttcgacaatgctgtcttttcctttttccgtctgtgaatatccgtagactgaaaaggcaagtacaatagatgttataatattcttcatggtattttggaatgatgggggtaaagtaatttttgattttgggtacggaagctgtatgctattgcagaacgagctgttcgagtttatcagaaagggtgttttgaagaattgttaatcggttggagagcttgtatatcgaggcttttataggaggaagtattgaaaacatgagtgattatttgaagtttcagttgtcaaatataacactatttataataagtctaaataaatatagttaaaatttacgacaaataatgtaaaacattgatattgaagggttcctgttttgaaagaaaagtgtaaaatctggtgaaatattaaaaatttgaggaaaatgcctgtaaaaacaagacttcacagagtttgagaaaatggaaaaggaggagaggaataaaagcagaaaaaccaacttattctataatagaacaaattggtttttattttaaaaggaagtaaggttggactccctactttgtgatttctctgaaaacggcttcgagatttttatttttctggttcagttgtaatgtttttaagccattttcattggcaaaatcaaaaatagccggacgcatgtctttttcagaaacaaaagttagttcccaggtcatatcgtgtgtgtttttgtaggctgtaatattttcaagtttagccagaagctgttcttctacctgataatcaaattctacctcaatcacttgctccgcattttcagataccagatggtctaattttttgtcggcaacaatttgtcctttgtcaataataatgacacgatcgcagatggcttcgacttcttgcatgatatgagtagacagaaaaacggttttatctttccctacatttttgatcacatttcgaatttccattaactggttagggtccagtccggtagtaggttcgtccagaattaaaacctccggattgtgcaataaagcattggcaagtcccacgcgctggcggtatcctttagacagctgtcctatttttttatgactttcacctgacagtcctgtcagttgaatgacttcttcaattcttgattttggaacctgataaacatcggcattaaaagccaaatattcacgaacatacaaatccagatacaacggattatgttccggtaaatagccaatagaacgttgaactgcctttgcgtccgtcatgacatcatgaccgtttacaagggctgagccgttatctgccagtaaataggtcgtcaaaattttcattaatgtagattttcccgctccgtttggccccaaaaatccgacgatttctcctttttcaatagagaatgaaatttcatttaacgctttttgcgttccgtaactttttgatatgttgtttactgctatcgacatgactttttatttgctacaaaagtaaacagaaatacgctcgattgctacatttttgtcttttaaagaaatcataaaaaaaatataaaagccagtcgttacggcatcgttcttgttaaaaggaaatcaaatttaaaataatttataatgaaaaaaatgttggtggttcttgcattagctatggttagctttgcaaacgcacaaaaaggaacaatcttagttggtggtggtattggttacaagtctcaaactacaactttagggaacaacgaggttaaaacgaatgaatttgatttttctccaaaagttggttaccaatttcacgacaactggactgtagggggtgaggcttcttttggttcaagcagagacgagcgtggagtaaacgaagtgaaaaacaacactactaaattaggtgcatttttacgttacactatgccattgaaccaaactttcgctttcttcgctgaattaggaacaggttttcaaagtgcaaaacaaaaaacgtacacaggaccaatgacttcaactgctaaagcagacggtatgtacattggtattacaccagctcttttcatcgacatgaaaaaaggttttggtttaaactttaacattggaggtttagggtacaacactttaaactatgataacaatggaccagaagttaaaaacttcgattttaattttggtagaacatttaacattggagtttctaaaaacttctaatcttaaatagtattcaatttcagaaaagcatccgccacggcgggtgctttttttgttttcagattatcttatgaaaagtaaaatttgttgtttagccccgatagaagtggtatccttttgtggcggggttcgccataaaagatataacggatagcgggactgaaggtcttttgaaaaaaaaaatcttctgctgctaaaaaaaaagccaacaatagcgaagtcgaaaagaaatcataactacaagaacttcgacttcgccggttggtactaaaaacaacaacaaaatatatttaaaataaaaactcgttgcgcgaaattgttttaacacatagaaacatagtctttgtaaacttaaaaaagcgtttcacttgtttaaaaacagatagactgttatgtgaaagaaatgtatttcttttgatttcctttattcttcggttaatatctatgtttctatgtgtttaataggttttttgccacgaattcgcgaattatcacaaatcattgcggttctttttttgtgacaaattctactaattatcacaaatcattgcggttagcttaatttgtgaatttgtggcgaacaaaagtttttaatcttttaaatcaaattaatcggtggccaatttttcttcaatattatcctaaaataaaacgtatttttggcatttagatcgtaaaatctaaaatctaaaatctaaatttgaaaatgaactgggaacaacttttatcactcaaacgccaaggcgataccagcaaaagattacgtgtagaacaggacgatacccgcttgggttttgaagttgattatgacagaataatcttttcggcagcatttcgctctttacaggataaaacacaagttattccgctttcgaaaaccgattttgtgcataccagattgacacacagtttagaagtttcggtggttggacgttcactagggcgtttggttgggaaaaaaatcatcgaaaaatatcctcatctaaaagaagttcacgggtatcacatgaacgattttggcgctatagtagctgcggcttctctggcgcatgatataggaaaccctccttttggacactcaggagaaaaagcaattggagagtatttttcgataggaaacggtttgaaatacaaagaccaattaacggcaaaacaatggcaggatttaattgattttgaaggaaatgccaatggattttcggtgcttacagcaagccgtccgggaattgagggaggacttcgaatttcctacgctacccttggtgcttttatgaaatatccgaaagaaagtttgcctaaaaagcctacccagaatatcgctgacaaaaaatacggtttctttcagaccgacaaatctttttttgaagaagttgccaaagatatgggcatgattgtcaataaaacaggagacgatattggtttcgaaagacatcctttagcctatttggtcgaagcagccgatgatatctgttataccattattgactttgaagacggaataaatctgggattggtttcagaagattatgccttagagtatttaatcaaactggtgaaagacaatatcggagtagccaaatacaagacattaacaacaaaagaagaccgaattagttatttacgtgctttggctatcggaacattgataaatgacgctgtaaatgtttttgttgaaaatgaagaagctattttggatgggaaatttccttttgctttaacagataagagtaaatacaaagcgcaaatggatgatattatcaaactaagtgtcgataaaatctaccaaagccgcgaggtggttgaaaaagaaattgtagggtatcagattattcaaaccctgttggataaatttataactgctttcaacaacaaatacgaaggaactgcttcaaactacgataaactgcttttgaaaatgctgcctgaaaaacatcacttagagaaatccaatttatacgaacgtttgctgcatatctgtcattacgtttctttgttaacagacgggaatgcactggagctgtttgaaaccattaacggcagaaaaaacaaataacacgctaagctgcagaggtaattgacaagaaaatgattttacacataggaacatagatttcaggtgtaaaaagagaactaaaaaagaaatacatttctttcacagagaaggatatgtgtattgaaataaagtaaaacgtcttttttattgacacagaacctatgtcactatgtgttaaaatgaattacaccaacgtttaatattttattgaaaagcatatacgagacccacgcctaagacttgtcttagctgggctcttggtccattgttaacttgtgaagttgttccggtagcaggatcaaaaaagtcttttttggttttgatatcatcatcatacaccagatgtacgccaatatttgcttttacataagcatttaccacaagatccagacgggtatcataatcgatatcgacgtttccaaatttgtttagataatcagtatacaaactcaatcggttttcgtagaagatgtttttgtaaatctcgcttttcatgtatccggtaagcagaataccaaattcggcttttaccttctgcccgttttcaactaaaattttagaattcgggtccattggatctactatgtaagtcgcttttcgcacaccaaaagatccttgattcgctaaagtttgatccagaactaaggtagtttttagggttatgggagagaaatataaggttcggtttttctttttatctgaattttcagctcctgctccaagaaagacataagctggtgcaaaaggtctggagatcgcaacatctttgttagggtaattgtacccgtcagtaaattgagtattgaaattgaatttcgccgagtagtaccaatttgagatcgtatcttttctaaaaccgtaagttgagttgaatagaaaagcatcatcagtttttcggagttcagtaccgtcttgctggtttagaccgtattttataataagttcattggcccatttgtgattccctctaatataagttcggttaaactcacctttaaaaagtccggagatcgagcttgttccccccgcgctccagtttacaaaagcaatttcggaaatgtcaaagcccagttgattttttttggtccagtttgatggtggagcaggtaattcgccaggatccaaagtcgtttgtataatttgagcaaagttatttgaagtacacaaaagcagcaaaagcaaaagggtagaacgcaataatttcattgtgattttattttttgacagcgcaaaataattattttgtatcgtttgaaaaaagatttattaaacttttaacgtcaattttacacaattgttgtaactgattaaccgttccatgctctataaacttgtccggaatacccaaaacttcgatggtatttttgaaattatgtgaggctgcaaactctaaaatggcacttccaaaaccaccgtttacagtaccgtcttcgactgtaattatcctctcgaaacttgcgaaaacgtcgattaaagtgttggtatctagtggtttgatgaaagagaaatcgtagtgggcaatggttgcggaattgtgagattcgtttattgcttcgatcacattatttccaattgttccggtggacaaaacggctgtttttgttcctttttttaggcaggttgcggcaccaatttcaatttttttataatgtccgaaattttctacttcccaatttgagatgacgccacggcctcttggatatcgaatggcaatgggatgatttaatcccaattgtgccgtatataaaatattctgcagggcaatttcattgaggggagcataaataatcaggttcggaattgcacgcaaataagcaatatcaaaaaggccatgatgtgtggcaccgtcttcacctactaacccggcgcggtcgagacaaaaaataacaggcaagttttgcagtgcaacatcgtgaatgacctgatcgtaagcacgctgcaaaaaagtcgaataaatattgcagtagaccgtcattccctgcgtaaccattcccgcagcaagtgttaccgcatgctgttcggctattccaacgtcaaaagcgcgttcgggaatctcatccatcataaatttaagagaacttccggatggcattgccggagtgattccgatgattttttcgttctttttggctaaatctaaaatcgtcagaccaaaaacgtcctggtatttaggaggtaaattctcttctgatttggaataaagttctccggttgaagcatcaaattttcccggagcatgatattttacctgattttcttcagcctgctgtaaaccttttccttttgtggttacgatgtgcagaaatttaggaccttttatcttctttaagcggttaagctctttgattaaagcaggaagatcatgaccgtcaattggtccggaataatcaaagtttagtgacttgatgatgttattctgtttcggatttttcccgtttttaaccgctgttaaatattttttcaaagctcccacacttgggtcaatcccgatagcattatcgtttagaatgaccaaaagattagcatccgtaaccccggcatgattcaaaccttcgaaagccattcctgaagcaatcgacgcatcaccaattacggctatatgctgtttgtcgaaatcgccttttagttttgaagcaatggccattccaagtgccgccgaaatagaagtggaggaatgtcccacgccaaaggtgtcataaatactttcgcttcttttaggaaaaccggaaatgccttcaagctgtctgttcgtatgaaaaatttcccttctttccgtcaggattttatgtccgtaagcctgatgtccaacatcccaaaccaataaatcgtcaggagtattaaacacataatgaagtgcaatggtcaattcgattacacccagactggagcctaaatgcccttctttaaccgaaacaacatcaataataaaatcgcgtaattcctgtgcaacctgagaaagttgcgcttcggataataagcgtaaatcagcgggattgtatatgttggagagtaagttacttttcattgtaaggtaaaaagcaaatttacggtttttaaaattaaattcagttcaatgaaattgtctaatatttggtaatagatatggcatctattccaggagttattagatttttggatattgtatctgctttgattgataaaacagcaaggtatctggtcgtcgttagtttttcattttgcataccgggactccatttttcagctgtttttaaagcccttataagttcttccccaagttcatttttactgctttctattggtttaaaataggataaacttccatctttttcgactataaacaaagttttgaatagtgattttatgttttgtagctatttttactgttcaaacggaatcgataaggtataagtcgagcgaacaatttgttttttaaattttccaggaagccattttggtcctttttctaaaactcttattgcttcttttccgttttctattgatgtgtttttaacaatattgaaattagttaaactgccatctttttctattacaaataccacagttgttttgtccggatctattcccgttttacttggaggagtataatttttaacgaaaaacttatgaaattttttcattccattttcgggaacaggtaaaacatccaagtcacttgagttgtaaataatagcatacgtgccatttggtgtgtttgttaatgcggaatcatttgtaggtgtaatcggtatacctgttgtatagtttcgatgttccgcaggtactacttcgactttgtcaattttctgtttattaccgttttgatcctgacagctgaataatgtagtacccatcgtaataaacaatgccagtaaaaacattttgtggtattgcgtttgtgagtataaaacacgactcggaatatgaataattacattatcaagttgtgtatttttgaatcttccgcagatacttttattttgatttgaaataaaataatgctgtacttcttccggaaacatttttgtaaaatctaccacagttttagtacagcttaaacaaaacctcccattgccttttggagtcatctcgtcccagttttcgtggcacggctcgggaatattgatttgatgtcttttattcatgatttaaatttcaataattaaatgtaataaaaaatttaagtaaaaatgtacttttgtatttatgataaatcctttcaccgacgaatacttcatgaaaaaagctttgcaggaagctgaaatggcttttgaaaaaggcgaaattcctgttggagcaatcattgttgtcgcagataaaattattgcaagaagccataatttaaccgaattattaaatgacgttacggctcatgcagaaatgcaggcgataacagctgctgccaatttcttaggcggaaaatacctcaaagactgtacgttatatgttaccctcgagccttgtcaaatgtgtgcgggggctttgtattggagtcagatttcgaaaattgtttttggtgctcgcgatgaacatcggggtttcatgacaatggggacccaattgcacccaaaaacaactgtggtttccggagtgatggccaatgaagcggctgatcttatgaaacgcttttttgtagagagaaggaaataattgctgtagatcatgaccaatttctcaaccataaaaaaactatttcacatcactgaatctaatggttttgcagatagtgaaatggaggcagttaaaaatatctttggtgcacttccggaggtatttgtggactactatacagaattgggtaaaattcaaaacctaaaccacacacaggatttattaatcgtaccggagcgttttcaataatataaacacaatgattatttgatattttattctgaaaatcaaaaggcttgtgtgtgggggattcataaagaggatttgtcaaaatctgatcctccggtatacatgagcgaagacgagcaagactggaatctggaaacggaaacgttaagtgatttttttactgcaatggcttttcttcaggcaggttttgctttaaagtttccgggtaatacattttatgaattggaagaagatgaattgaactttgttcgtgcaaacttcagaaataaaggattctcttttaaacaatggcttggaggagtaaatttttatggtaattatgatgatgatgtagtcatagtgcaggcagcgaatcaactgctttatgcagctgacacaaaagaacattctgttgcattgaacaaagtattgtccggacttgggacagaattataaaaagaggcagtttgaaaagagagcttcctaaagtactaaaaaatgaaagggctaatctcaaatagtctctgaaaatgctgtaatcatttttacccttaagagcatttaaatattttgccttggagaattttcctcttaaaagatttagaaaaatacattatatttatgcaatataattgacacaccactagtttatttatagagtggtaaaagctaaagtacattgtcaattttcaaattcgtaaacctgtaattctaaataaaagtgaaagtaaaaggactatttctcgtgttttgtacgttttttatttttcaatcttgtggtcgcaaatcagctgccgatttcaattccgatttttcattattcaaagagtacattgttagttttacgggaggcatcgtctcttcggaatctgatattagagttgttttggcttttgataaaaaagaatggaaagtcaatcaggaattagacgacgatttatttgatatctcgccaaatgtacgtggaaaagtagtagcactctccaccaatacgattgcttttatcccggagaaaaaactggaagcaggaacagaatatcaggtgactttaaacttagataaacttatcaccattccaaaggaaaaagagaaggagctttcaaagttcaactttaccgttaaaaccatcaaacaggattttactattaatacggaggatgttcaatcgtatagtaaagattaccagtacctgaactgcgttttaaaaacggctgataatatggatgttgaaacagctaaaaaattagttgaggctcatcagaatgggaaggatcttaaaattaaattcgaaaaacaaacgggaacagccaaagaatttcgtttcaaaattgacagtattcagaggtttttagaagcttcgaatctggaaatcgaatacgacggaagtgattttgatatcgaccagaaagggcagttggattatgcggttacgggtttaaaagaatttaaaattgtaaaagtcgatattcccgaaggaagtaatcagtctcttttaattaatttctcggaacctttagaaaaagggcaggattttaaaggattggtctctattcagaatacaaacaatttgaaattttcgactcaggggaatgtcctgaaagtatattttagcaatacagctccggagaaaaaagaagttccggcacctgtagaagagacggtagatttagcggttgattcggcagcagttgtagttgattcggcggcagttgttacggatagtagtgctgtggtagtggttcagaacgaggaagagactcaggaaccggaaccagttttgtcgggagaattgttacttgaagtttttcagggaatcgaaagtcagtacggcaaaaagatggacgccaattataccgagaaaatcaattttgaccaaataaaacctaacgttcgattcgttaaaaacggaacgattctgccaagttcaaacaatctgaaattgaattttgaagcagtcaatctaagtgcggttgatgtaaaggtgtataaaatttacaagaacaatattcttcagtttttgcagtataatgaactgaacggaagtcagaatctcaaaaaagtggcacaacccatagccaaaaccacactgaatttagtcgaaagcaaactaataaatccggcgaagtggaacacctttgctcttgatttatctaaaataatcacgccggagccaggcgcaatttaccgtgtagaatttgtttacaaaaagaaatattcgctttataaatgcgaaacctccgatgagagttcggaggaagaggaagaagaggtagatgaaaatgatgtgaactacagtggcaattcgtatgatgattactattatgacgattacgactggagagagagtcaggatccttgtacaggatcgtactactataatgccagaattgcgacaaatatcttggcaactgatttaggggttatagccaaaagaggcgagaataaatcgtatctctttgcagtcaataatattgtaaccacagagccggtttcaaatgcgagagtggatctgtatacctttcaacagcaaaaaattgcaactgctgcaacaagcagcgaaggaattgctacgtttcagctcaataagtttgcttactttgctattgttactttaggagatcagtctacttatgtgaagttggatgacggttattcgttatcggtaagtaattttgatgttgcaggtgaaactttgcaaaaaggcttaaaaggatttatttacggcgagcgaggtgtttggcgtccgggagataatttgtatttgtcctttatcttaaacgatgcgtcgaataaacttccaaaatcacatccgattaagtttagattaaacgatccgaatggtaaaacaacttatcagacgattcagaaaacaaacgacctgaatcattacagttttatcgttccaacaagtgctgacgcgccaacaggaaattgggaagcaatgataagtgtgggtggtgccaagttttacaaaagcattaaaatcgaaacgattaaaccgaatcgtttaaaaattaaaaataatttctccagaaaaacactatcatcctcttatccaaataccagtacacttgaagtgacctggcttcatggtgccattgcaaaaaatctgaatgtagaaatgcaggcaaaattttcgcagcagaccaccacatttaaaggatatgagaagtttaattttgacgatttggtgcgtcagtttagttcagaagaaattaatgttttctccggaaaattaaatgagaatggaaaagcatcagtcgatatccacccaaaactacaagggcaggctcccggtatgttgcgtgccgtcttcattacaaaagtatatgaagaaggaggtgattttagtactgatgttatttcgacgacttattcaccatacaaaacttatgttgggataaaagcaccggaacctaataaatatggaatgctggaaaccagaacgaacaaccgttttgatattgttacggtggatgaaaatggaagaccaaaatcagtgagaaatctcgaggtaaaagtgtataaagtagattggcgctggtggtgggacgcttccagtgataatctttcaaattacaactcgtcggatgcgaccacttcgtataaatcttttgtgatcaatacagattccagcggaaaaggaagtattcagttttctttaaccgatgaagaatgggggcgctatttgatacgtgttgccgatcatacagacggacacgccactgctttaaccgtaaatattgactggccaatctggtccggaaaaacccgcaacagagatgcctctacagctaatatgctggtattctctaccgataagaaaaattatgctgtaggcgaaaaagcacagatatctttcccttccagtgaaggaggccgtgctttgatttcgatcgaaaacggttcaaaagtggtgcagaccatctgggccaaaacaaaacagggagaaactaaagtcgaaattccgattacggcagccatggcaccaaacgtgtattttaacatcacactcttgcagccgcacgcttcaactaaaaacgattcacctattcgtatgtacggaatcgttccgatagaagtggtggataaaaacaccattctggcgccgaccctctccatgccggatgttttaaaaccggagcagacttttaccgtaaaagtgggagagaaaactggaaaagaaatgacatacaccattgccgttgtagatgaaggacttttagatttaacccgttttaaaacaccaaatgcctgggacagtttttatgttcgtgaagccttaggagttaaaacctgggatatttatgacgatgtgatcggagcatacggaggaaaaataaatcaaattttcagtattggtggggatcaggatttaggtggcggtaaagccaaaaaagccaaccgatttaaaccagtagtgttgtactacggaccattcaaattagaaaaaggtcaaacgaaagcacatcaactgaaactgcctaaatacataggttcggttcgtaccatggtcgttgctggtgatgccaatacaagtgcctacggaagtgtcgaaaaagcaactccggttaaaagcccgttgatggtattggcttcattacctcgaaaaatatcgccttcagaaaaagtaaccattccggtaaccgtttttgctaccgaaaagaatattaagaaggtaacgattcagcttagaacaagcggcggattaaaagtaatgggaagtgctgctcaaagtctgagttttgcccagcctgacgaaaaaatggcctacttcaatctggtagtaggttctgctaccggaattggaaaagtgcaggtaattgcgacatcaggaaaagagaaatcagtatatgatgtagagatcgatatgaccaatcctaatccggttacaaatacgtatacggatgttgttttacctccaaacagcagcaaaaccattacctggaagacctttggagtttcaggaagcaataaagccagactggaagtttcctcaatgccaaccatcaatcttaatggaagactgcaatacctcattcagtatccgcatggctgtgtagagcaaactacttcgtctgtttttccacagttgtttttaagcgatattgttgatttggacaacacccgaaaaggaatcattcaaaagaatataacggccggaattagtaagttaggaagttttcaattgccatcaggtggtttaacgtattggcagggaagtaccactgccgatgattgggggtcttcttatgccgggcatttcctgattgaagcagagaaaaaaggatacgttttaccgattaattttaaatcaaaatggatttcttatcagcaaagagaagctaaacaatggcgttttgagcctaagtacggtaatgatcttgctcaggcttaccgattgtatacgctggcgctggcaggcaatgctgatttgtcttcgatgaacagattgcgcgaaacaaaaggtatttcaaacgaaagtaggcttcgtctggctgctgcctatgttttggccggacaaaaatcggcagggcaaaatttattattgcgcaccagtattgacagcgagtccagcgagtacaattattactattatggatcaagcgagagaaacagagcgatggctttagaaacgatgctgcttttagggcaaaaacaaaaagcattcactatggcttctaaactggctaaagaaatgtcgaccaaccaatggatgagcacacaaacaactgcttattgtctgtatgccatgtctaaatttgctgttggcaacggacctaaaggaattaatcttcaattcagcaaaaatggaaaaagcgaaaccataaatacacaaaaaacaattgccgacagaagtttaacagttcagacaggtgccaatagtgttgtcctgaagaatcttaaaaacaacacggtttacgttagagttttaaataccggaatattaccaatcggacaggaaaatgcgattcagagtgatgtcgctgcgaatattgttttcaaaaacagaaaaggaagtgctattaatgtttcgaaaatcagtcaaggaactgaatttgttgcagaagttacagttagaaaccaaagaaatgaaagcgttcagaatgtggcactgtcacaaatcttgccttcaggatttgaaatcgttaatacccgtttcacagactacggtgacgcgaccaataatattgcagattatattgatattcgcgacgacagaaccaacttctattttggaatgaaatccagagagaccaaagtattccgaattctgttaaatgcatcctatttagggaattattatttaccgggattgcagtgcgaagcgatgtacgataacaccttcctggcccgaacaaaaggattctgggttgaggttgtgaagtaaaaatatggaacacagattataaagattaataaagatttttttgccacgaattcacgaattttaattttttaaattcgtgaattgcttcgcctgttcgctatcgcttgggtcgtggcgaaagaaaataatctttttaatctgtataatctgtggctaataaactttgtgaactttgcagtaaaatatagttattattacactgtcgtttttatttgcaaatcttgcaattggtcagacgcaccaaattacaaaacacaatggagaacaattggatgttaattttatcaaacaggaaaatgatttaatttattattcattagataggagtagagaagaacagaaaattagcaagtacgcagtttcacaattgaccaataaagaaacaaaagaaactaaaaaaattagtgataaagttctggttgattctaaatcagattacaaattggtgacagttttgtctcaggagaaaacagccggtttgaaacaggtggctaatttttcgggagtctccactaagacaaaaggagagtctccacttgcaaatcagaaacaaactgcgatgagaataaaaacaaaatcggcttcaaacggatacccatttgtgagcattgttgaaaaagcagatggaaagtatgaagcagtagcttatgcgtattaaattttgtgttaacttttattaattatcatcaagtcaatattttatagtttaaaaaaagagtacctttattaatcacttaaattaaatattatgtcaaagaatctaaatactgtagcagcaatcataggtgctgcggccgctggtgcagcgattggaattttatttgctcccgataaaggatctaaaacccgtgctaaacttaaagaaggtttagatgatgcagctcataatttaaaagattcactttcagcaagttctgaagtactgcgtgaaaagtttacccatgcaaaagaaaatttagatggaacttatggagagctgctttccaatatgagttataaaacagaagaagtaattagttttttagaagctaaactggctgatttaaaagcacaaaacgctaaacttcagaaataataatccggaagcacaaagcttagaatgatttgttggattgtttcggttattttattcttagaataatcaaatgccaattttgaatcataagttttgtgcttctttttttaaccaaaactacaactatggcttttgaagaattaaaagagaatactgaaaatattcaggatcaggctaaaatttatctcgacagtcatttggcctactataaactttggggttttaaggtcgcaatgaaatcgaccactctgatttttaagtttactttgattttattgtgtgttggaatggtattactttttggatctgttgcagcagcattcgcttttagcaattggtttggaagttacactttgggatttctagcagtaggagggatctatcttttggccacaatactacttttctttgtaaaagataagtttgtagaaggaccaattttggagaaattttcagaaatattttttaatgattaattatggaaacaaaaaaatattcatcatacgctgaaatcgagagagatttagaaattctgaaattggagaaagatattaattaccaaaaattagtattaagttttcaaaaaactaaggagtctataacaccacaaaatgtaattaacggagtattttcttcttataaagagtatttcttcaattcgtatccacaaattttacaatccattttaccctatattatcaattggtttataaaaagaaaaagaggcaaataagcctctttttcttttgttaattattttatttctggttgaatgtcatcttcataaccagactgttgtggttcgattggttttattttctcaatttttttgttcgtttttttcatcatttcaccaacctggttagaagctgtaaacgaggcaaccatattgttgagcatatcacttccggcttgaggagaatttggtaacaagattaggttcgaattggcatcagcaccaattgcctgtaaggtatcataatgttgtgtaactacaattagggcagaagcttcctgagaattgataccaacattgtttaaaacttcaacactttctacaagacctctggcaatttcacgacgctgatctgcaataccttgaccttgtaaacgtttactttcggcttcggcttttgcttttgcaacgattctgattctggaactttcagcttcaaattcagcagcagttttttctctgtcagcggcgttaattcggttcatggcattttttacctgaatgtcaggatcaatatcagtcaccaaagtattgatgatatcataaccataagtagtcatcgcttcattcaattctctttttacggcaatagcaatgtcatcttttctttcaaaaacgtcatccagttttagtttaggaacttcggcacgaaccacatcaaatacataagcagtaatctgatcgtgtggatattctaacttataaaaagcatcatatactttttcctgaataactttgaattgtaccgaaactttcatttttatgaaaacgttgtctctggttttggtttcaataataacatctaactgttgtattttaagattaacacgtccggccaatcggtcaaccaaaggaatttttagttgtaatcctgaatttcttacgcttaaaaattttccaaatctttctataattaccgacgattgttgtttcacggtaaagaaggaggacattagtataaaaaatgccaggactaaaatgataataaatgctgtactcatggtgataatgatttagtttttatgatcttctaaaaatacaaattatatgttgataattgtttattaattatttttctaacgatttttagtgttaatttatatatatatttgcgctcaaatttaaaccaaaaacaaatttatgaaaagaatactttttagtattgccttactctcttctgtttatttatcagcccaaactgttattgttgaggaaaaatatgaaaaaaataatgaacctactggatttagatatcttcctaattcaaaaaagtttgtagtttttaaaggagaaaagctttatttaggtgctgtaactcctagtactatattttatatgacaaaatctggatatagttttgatgaaaatggcagtaaatctattttatttgaaaataaaaaattagctaattgtactttttcagttagcgaaaattcttttaaagctttaggaggagataaattatcgagtacaggtatgcgtgagtattatttaaataatgtttacaatagtagcatttcattcgacgacattaaaaaaacaaatagttgttattttggacttgtaaatgttagtaatcaatttatgccgaatgttgggctatcttttgatgatgttttttttgaaaatcttttttatagttctttttccgacttttatgatttaggattaacaaatcaaaaggggaagaataatattaattttgaaaaagatgaaatttatttagaggtttttgatttaaaatccaagcaaaaaaacagagtaaaattagaaacgcctaaattagatttgttaaaaggaaattcattaatagaatcaacaaaaaaaggtgtgacttttagttgtaagctgaaagcaaatgatacttttgatatggtgacaaaatcaatttcaaaagaacgtaatgagaatattatttataaaacaacttatgatattcaaggtaagaagattaaggatgtaacaatgaagctaaatttaaaagataatttttttattttatcttcctgcggtgctggttatgttgacaattttgcttgggatgtacaggcagttaataattattacgaagattctaagaatggtgatatttatgtttatggaatttataacagtgagaaatctagaattcataaaggttttgatgctgttggattctatatttttaagtttgataaagatggaaataaaatatgggaatctattaatccaatcaaagacgaaaattttgaaggtttatgttgtggtttaaactttaatcttaatttatttgaatacaatggaaaactcctttttaccaattctgcagatgtattcatggaattttctaattatgcagttgttgaaaaatcttcaggtaatgtattgaaaatgaataatgtaatttataatcgtacaactagttatttaagaagaagagcgtttgtaaataattcatatgataaagtagatataaaaaataaagcattctcacctgtttcatttgttgcaatggatcttagtccggcaatgaataattatttaaaaaccattccaagtaagggaaatgcagtttattttgaaaccatattttctgatcagggaatatggttgatagaaacggataatgaagaatattataaagttcttttgtttaaagactaaaaaaaagctcccaattttgggagcttttttgttttataaagtcgaaattgctttttgaattctcgaaatagtttcttcttttccaatgatttcaacaatgtcaaataggtgaggaccttttagtgctccaaccaaactaagtctgaaaggctgcatgactttccccataccaatttcatttttagtcagccagtcttttacaatggtttcaatattggctgaagtaaaatcttcaatattttctacaaccgaaattaattcttgcattaaagcaggtgtctcttccttccagtttttacttgctttttcatcataagacgtaggtgcctgaaaaaagaaatctgttaaatcccaaaattctgaaacaaaattagctcgttctttaatcagtgaaacaattcttgtaagctttgcaatgtcttcctgagcggagacgaaggaagagaagcctttttcttctaaaatagaagagaaactttttgctaaatcggcatcattttgttggataagatgctggtgattgaaccatttgtttttctcaggatcgaattttgctcccgctttatgaactctgttcaaatcaaaagaggctactaattcttctagagaaaatatttccttgtccgttccgtcgttccatcctaacaaagccaggaagtttacaactgcttccgggaaaaatcctttttctctgtagccggatgaaatgctttcttccgttttccattccaacggaaacacaggaaatcctaatttgtcaccgtctcttttagataattttccgtttccaaccggttttaaaatcaaaggtaagtgtgcaaattcaggagcatcccagccaaaagctctgtacaataaaacgtgaagaggcatagaaggtaaccattcttcaccacgaattacatgtgaagtttccattaaatgatcatctacaatattggctaagtgatatgttggcattccgtcgcttttgaataatactttatcatccaataaattggtttcaaattttacatcaccacgaataatatcttttaaatgtaaagtttcatcaaccggagttttaaaacgaatgacataatgctcgccattggcaattcttgcagcagcttcatctgcagaaattaccaaagaagtatccaacttttcacggttatgatgattgtatataaacgtttttccttcagcttcgtgttgctttctgtgtgcatccagtgcttccggagtatcaaatgcataatatgcccagccagattggatcaattgatcggcatatttttggtatatttctttacgatcgctttgtctgtacggaccaaatttttcattttttccaaccgtttcttcaggagcaattcctaaccattccagcgcttccataatataagcttcagcacctggaacaaaacgagtctgatctgtatcttcaattctcagataaaaaacaccgttatgtttttttgcaaataaataattaaatagagcagtacgaacaccgccaatatgtaatggtccagttggacttggtgcaaaacgcacacgaacttgctttgacatttgtttaaattttgatgcaaagatacggtttatgattttagatttaagaatgtcgattttagatttttgcctcctgaaagcttagaaccttagtaacttagaatcttagaaggtattattaaaattactacttttataggttataaataaaagagattcattttgaaaacaacatctgccatatatcaaaaattagaagcatttataaaaaaatattatacgaatgaattgataaaaggaggacttctttttatgggttttggattattgtattttcttttgacactttttattgagtattttctatggttgaaaccatttggaagaaccgtattgttttggttatttattggagtagaagtttttcttttgtttcgatttattttattccccgtttttaagttattcaaacttcagaaaggaatagattacaatcaggcttcggctattattggaaaccattttacggaggtaagtgataagctgactaactttttgcaattatcggcttcaggcaatacagccgaaagttcggaattaatgctggcttcaatagaacaaaaagccaattctttacagccgattccatttggaaatgcgatcaattttaacaataataaaaagtatttgccattagcaatcgttccggttttgctttttgccgtgttttatatttcaggaaacagtactattatttcacaaagtttaaatagagtagtgcattttaatgctacctttttgcctccggcaccttttaaatttgttgttctaaatcagaatttacaaaccgaacaaaacaaagattttgttatcaagatggaatctgttgggaagatcgttcctgaaaatgttatgattcatgtagggaatgaaagttattttatggaatcttctcaaccgggaaagtttgaattcaaagttgaaaagccagttgaaaatgtttctttctcttttgaaggtaatacagtttcatcagaagaatacgaattgaaagtgatcacagttccatcaattgcgaactttgagatggtacttaattttccatcttacttaaaaaagaaagctgaaattattcagggaacaggtaatgcaatcctacctgaaggaactttggtaacctggaaaatgaaaacacaatctactcaggagatcgtttggaagggcgaaaattcaatttttaagtttaatagagaccaaaatgagtttaaattggctaaaaacataagtcaaaatacagaatatcaaattcttacctcgaataataaggtcaaaaactacgaaaaactggattatcagctctcagtgatcaaagatcagcacccatcaattcatgtagcaccagctccggatagtttgaagttagataaaaattatgttctgggtaggttaggggatgattatggtttgtctaaattacaggttgtttattatgaaagaaacaaacctaacactgccaagcgtggaacaatacctgtgaagtcaggagtatttgatcagtttgtttttaactttccaagcaatctggcagtgcaggagggagtatcttatgaatactattttgaagtttttgataacgatgcaccacatggttttaaaagtacaaagtcttctgtgttttctgatcgtgttgctaccactgatgaaattcatgataaggaattgcaacagcagaatgagaacattaatagtttagagaagtctttaaagaatcaaaccaaacagttttctgagatggacaagattcagaaagccggtaaagagaaagagaatttagagtttaaagatcagcaaaaagtaaatgattttatcaagcgtcagaaacaacaagacgagttgatgaaacaatttacagagaaaatgaataaaaatctggacaagtttcaattggataagaaagataaaacagctgaagatttgcaaaagagattagacaatgctgaaaaggatctggagaaaaaccagaagttaatggaggaattgaagaatctaaatgacaaattgaatagcgaagatctgtttgataagatggaaaagttcaaacagattagtaaaaaccaatcccgtaatttagaacaattggttgaattgaccaagcgtttttatgtatccaagaaagcagagcaagttgctgaaaagttaaacaagcttgcagacaaacaagagcagctttcaaataaagacaaagaaaatacgcaggacaaacaagaagatatcaataaagattttgataaaattcaggaagatttgaagaatctgaaagaagaaaacaaaacattaaaagctccactagacattccgaatgatgcttcgaaggagaaagacgtgaagaatgatttgcagaaagcttcagaagacttgagtaaaaagaattcttcgtcagctaaaccaaaacaaaagagtgctgctaaaaaaatgaaaagtatggcagaacaaatggatgccggtatggaaagtggcgaacaagaacaaatggaagaagatgtagcaatgcttcgtcagattctggataatcttttagcctattctttgtcgcaggaagatgtgatgaaacaatttagaacaatgaaattgggttcgtcagcgtacacgaagaacattaaaattcagcaaaatttgaaacaacagttcagatatgtggatgacagtttgtttgctttatcacttcgtaaccctaaagttgccgaagacgtaaccaaagaaattggaaatgtacagtacaatattgataaagctattgaaagtttaagcgatgttcaggttccaaaaggagtatcgcatcagcaatatgcagtttcttctgcaaataagttggcagattttttgagtgatttattaaataatatgcagatgtctatgtcgaaaccgggatctggaaaaccaaaaccgggtgatggacaaggaatgcaattaccggatattatccaaaaacaaaaaggtttaggagataagatgaaagaaggtatgaagtctggcagtaaaccgggagataaacctggggataaacctggggataaatccggtgaaaaaatgggtgataaaccgggcgatggaaaaagtggtgaaggcaaagaaagtaatggaaaggatggtaaaggtaaaaatggtgatggtaaaaccggtcaggggaataaaaatggaggtcaaagtaatgggcaggtgaaggataatgatggggaaggagatgctgaagcaatcatggaaatttataaagaacaagtaaaattacgtgaagccttgcaaaaagaacttgctaaaaaaggattagactctgagggtaaatctgtaatcgatcagatgaaagcttccgaaaagcaaattttgaataaaggttttaagaatgagaacttgcaacgtatccttaatattcagcaagaattactaaagttaaacaacgcagttcagcaacaaggacaagataagaagcgtcaatctgaaaccaataagactgaatttcctaatagaacaaacgcgttgccgagttcgttactggaatatttaaacagtgtggagatattaaacagacaatcactacctttgcgctcgaattttaatcaaaaagttcaagaatattttaatacaaaatgatcaattttaattacgaaaccgaatttactttagacaacgaacaagctttttctgactggttaagtgctgttatcgtttctgaaaacaaaaacgaaggagagataaattacattttctgtgatgatgagtatcttcataagattaatgtagagtatctaaatcatgatacgttaacagatataatcagttttgattatacagttggtaacgaactcaacggagatatttttgtttctgttgaaagagttgaagacaatgctaaagattttaatgtttcttttactgaagaattgaagagagttttagcacacggcatattacattactgtggatataaagataaaagtgatgctgaagctgaattaatgcgatctaaagaagatgaaaagattgcgatgtttcacgtggaacagtagataaattacctttttttaattcagttttacatgttccacgtgaaacataatagagtagaagagggtgattaaattaaagtgtttcacgtggaacatgaaaaaaaaaagtttttttctgtgtataaaagaaccgaatgttccacgtggaacgattgttttttgataaagaatggttttagattgtttcacgtgaaacaatattttttgagaattatagggatttagtatggggaaagtttttagaattgaagagagtttctagttcaagtttcgaaacagaaagcttctaacctgaaacctgaaacttgaaacctgaaacttgaaacttgaaacctgaaacttgaaacttgaaacctgaaaaagaaaaaccacgttccacgtggaacaaaagaaaagaaaattaattctgagaaccgccttaaacggtttgaagagaataataaaacaaaatgtttttagaagaatacgatgttattgtagttggtgctggtcatgcaggatctgaggccgcggcagcggcagcaaatctgggatccaaaactttattggttacaatgagtttgcagaacatcgcacagatgtcttgtaatcctgcgatgggaggaattgcaaaaggacagatcgtgcgagagattgatgcgttgggtggatactcaggaattgtttctgaccgaacggccattcaatttaagatgttgaataaatcgaaaggaccggcaatgtggtcgccaagagttcaaagtgatcgaatgcgttttgctgaagaatggagaatgatgttggagggaactccaaatttggatttctaccaagagatggtcaaaggtttgattattgaggatgggaagataaaaggaatcaaaacttcgttgggagttgagattcgttctaagtctgttgttttgacaaacggaacttttttgaatggtttaattcatattggagaaaaacagtttggaggaggacgagcaggagaaagtgctgcaacaggaattactgaggatttagttcgtgccggtttcgaagctggaagaatgaaaacgggaacgccaccacgagtggatggacgttctttggattattctaatatgaacgaagagaaaggtgatgcaaagccggataagttttcttattctgatttgacttcaccgttaacacatcagcgttcttgttacatgacgtatacgtcattggatgttcacgatattttgagagatggttttgatcgttcgccaatgtttaacggaagaatcaaaagtcttggtccaagatactgtccttcgatagaagataaaattaatcgtttcgccgataaagagcgtcatcaattatttgtggaaccggaagggtggaatacttgcgaagtgtatgtgaatggattttcaacttcacttccggaagatattcagtttaaagcattgcgttctgtagccggttttgagaatgtgaaattcttccgtccgggttatgcgatcgagtatgactatttcccaccgacacaattgaaacataccttggaaacaaaattagtggaaggattgtatttcgccggacagatcaatggaactaccggatatgaagaagccgcttctcaaggtttgatggcgggaataaatgcacatttgaaagtacatgaaaaagcgccgttgattttgaaacgtgatgaagcttatatcggagtattgattgatgatttgattacgaaaggaacagaagaaccttatcgtatgtttacatcaagagcagagtatagaactttgttgcgtcaggataatgccgattttagattgacgccaatgtcgcacgaaattggtcttgcttctgaaaagcgtttacgccgaatggaaaagaaattaagcgagtctgaaaagatggtggccttttttagagagaccagtgtttctgttgcagaaacaaatcctattttagaagctaaagaaaccgctccaatttcacagggagataaaatgtttaaagttttctctcgtcctcaaattgatttagacgatatgcttaagtttgaaaaagtgaaagcgtatgtggaagaaaataatctggatcaggaaattttggagcaggcagaaattcaggtgaagtattccggttatatcgaaaaggaaagaaataatgcggataaactaactcgtttggaagaagtgaaaataccggagaatttcgattacgataaaattaaatcaatgtcgattgaagccaaacaaaagttaagcaagattcgtcctgtaactatttctcaggcttcaagaataagcggagtttctccaagtgatatttctgttttgttaatttacatgggaagataaaaaaagagacgtgccaataggtgcgtctttatttgttttgattttctttgtttcaagtttcaagtttcaagttttgagtttcaagttttgagtttcaagtttgaggtttcaagtttgaggtttcaagtttgaggtttcaagtttgaggtttcaagtttgaggtttcaagttttgagtttgggatttgaattttattacgttggattgttttaagagaaagtgatctgaaataaataaatgttccacgtgaaactactttgataagtcttgctaaacttgaagaaaatcgtaaaactatttaaaaaaaaatctgtgagatgcgtagtaaagcatttcaaattaattaatacttgttgcattagtatttttgatgcaacatttgcgttgccaaattctattaaaaacctataattaaaaatgaacgttttaaacaaaaaacattttctttctgtaaaagaccattctgtatctaaagaaatttttgatctgtattacgatgaaactttagatatgttaattacttctccacaacccgatttagaaaatcttggaagatattacgaaagcgaagattatatttctcataccgacaataaaagatctttgtttgaaaaagcctatcactttgtaaaaagtattgctttaaaaaataaactgaatttgattaatggtgaacaatctcaaaaaggcagaattttagatattggtgccggaaccggagattttttattgacagcaaaaaatgatggttgggaaacagttggagtggaaccaagcgagagagcaaaaaatattgcgatagaaaaaggaatttcttttgtaaacggaattgatgctcttgaaaataattcttttgatgtcattaccatgtggcacgttttagaacatgtaccaaatttggaattgcaaattcgggaattgaaaagattattaaaaccaactggaactttaattgtggcggttccaaatttcaaatcgtttgatgcaaaatattacaatgaattttgggcagcttatgatgtgccaattcacttttggcatttctcgaaaaaagctattcagtctctttttggaaaagtagatatgaaattagaaaaagtgcttccgatgagattcgattcattttacgttagtcttttatcggaaaaatacaaaacgggaaaaatgaatttcgttaaggccttttttattggtttgcgatcaaatttaaaagcatcgggaacaaaagagtattcatcacacatttatgtcttaaaaaacagctaaaacgtaaaataagcgcatttaaggcgttttctaagggaatatgagggtttgtgtcgtcttttttaataaatcgccttaaataaaagctatgaaagccgcttttaatagtgagattttatggtaaaatgccagtccataaataaaattaatgcagtaaaaatggagcatttttttagaaattttggtatttctttttagaaattcgagtttttagaaaagtgcttcttttttttgctaagttttgtttcgtgaatgtaaaaaataataaatattttttttgactggattaattttatgggtttgcgatcagatgaagcgcaacggtaaaaaaagaacaattcttaacggatttacgctttcaatcaccctaaaacttgaaataagcttgtttaaggggttttctgatgataggtgagtatttgtgttgttgtttctgagaaaacgtcttaaaaaaaggctgtgaaagtcatttttaataatgatattttatggtaaaaatctcctcaataaataaaactaatatcataaaattatagcattttttaaactttatgttgatgctatttatttttttatatttttgtcttcattcaatacaataaaaaaaatagagatttaaaaaaatgaaaaaagcattagtaattatcgcactttcaattttcgctgtttcatgtagtgacaaaactgcggaagttaaggaagtaaaaacagcttacgtagatacttcagttttaatgaaagaatacactgaagcaaaagaccttgaagctaaatacaaagctcaggcagaagaaaaaggaagacaactacaagctgagattacacgttttaaacaagacgctgctaattttcaaagtcaggcacaagcaaacggtcaggcgtgggcacaacaaagaggtgctgaattgcaaaaaagagaacaacaattgggttatgcacaacaagctttgtctcaacaattacaacaggaaagcggtgttgaaatggattctttggtaagtggagtgaagaaattcatcaaagattacggtaagaaaaacggttattcttatatctatggtactggagatgctgcttcaattttgtatgctgaagagaaattcgatatcacaaaagatatcgttaaagctttgaatgacaaatataaagcgactccaaaaacagaagaaaaaccagctgtaaaagaggaagctaaaaaataataccaaactaactaactaaatttaaaaacctaaatctgtcaagatttaggttttttcttttataaaaatacgatacttttagctctcaatttacgcctaatgcaaaacgtttcagaagcagcagcttatactttacaattcattaatcaaacgcaaaaatctattttcctgaccggtaaagcggggaccgggaagactacacttttgcgtgaaattattgccactacgcataaaaatactgtggttgtggctccaaccggaattgcggcgctgaatgccggaggtgttacgattcactcgatgtttcagttaccattttcagcctttattccatcatacgaagaggcttctcagtttactgaaacagtgaagtttgagaataaggaaactttacgtcgacactttaaaatgaataatgtgaagcgtaacgtaatcaggaatatggagcttttgattatcgatgaagtcagtatgttacgcgctgatctgttggatgccattgattttatgatgcagaccgtacgcaaaagtacccgtgcttttggtggtgttcaggtactttttattggcgatttgttacagcttccgccggttatcagagatgaagaatggcgaactttgcgcaattattacaaaggaaaattcttttttcattcgcatgtaattcagcaatatccgccgttatatattgaattatcaaagatttatcgtcagtcagatgatacttttatttcggttttgaataatcttcgaaacaatcagattacacctcaggatattcaggttttaaatgaatatgtgaaacctgattttgacttaaaaaataatcccggatatattacacttaccacgcataatgccaaagccgattcgattaatgagcaggcaattggcgatttagccggaaatgaattcgcttatcagccgtttattgtgggggattttccggagaaaatttttccggttgaggaaaatctaaagcttaaagtgggtgctcaggttatgtttgtcaaaaatgatttgtcttttgaaaagcgttatttcaacggaaaaatgggcgttgtaaagtcactttcggccgaagaaatattcatacattttcctgaggaggataaaaccattgaagttgaaaagtacgaatggaaaaatatccgatacaaagtaaacgatctcaccaaagaagttgaagaagaagttttgggcacatttgcacattatccacttaagctggcatgggcaattacggtgcataaaagccaggggttaacttttgagaaagctgcgctcgatgtatcgcaagttttcttacccgggcaagcctatgtagcattatcgcgtttaacgtccttaaacgggcttattttgttgtctccgctgcaaatgaatggtatttcgaacgatcaggatgtgatggattatgctttgaacaaagcaagcgaagaagttttgaaaaactccttgcattttgaaactaaaaattttattcataactatttgattagtagttttaattgggctgatttggctcaggaatggcgcaatcaccgttttagttataacgaaaatgcagttgcttctgaaaaatcaaagcatgctgcgtgggcacataagcgtttagaaataatagattcgttagcagatcctgcacaaaaattcgttaatcagcttaataaaattttcaataaagaaactgtcgatctcttttttgtacaggaaagggtagtggcagcttatgattatttttttaaaccaatggacaaactggttacggatcttttgaataaaatggccgaaattcagaaatttaaaaaagtaaaagagttctacgaagagctcgcttttttggatgatttgcaaacaaaagctgttttgcgcttaatgaaggccaaattactcatcgaaattgtcgtgacaggtgaaaccatctgtaaagagaaattgtcgtctacagcgattaaaaactacaaatttgacaaggttgcaaagatccgcgaggaatttaatatgtcgaacactgatatttttaaatctgaagaacctacagtgcgttatacagcacgcaaattagataaaagcacaccaaaggccgagaagaaaacaaccatcgaagaaacccatgatttatggctggagaaaaattcggttcaggatattgcccgaattcgtaaacttactgtgcaaacagttgaaatgcatttggttaaactaattcaggctaaaaaagtggagatatccgatgttttaccgtatgataaaattctggccttgcgtgaagctttcgagttttatagcgaagaatccttaagtccgctaaaggaaaagtatggtgatgaatttacgtgggatgagttgaagatgtttaaagcgagcattaactgatttttagatttttagattgttagattgttagattgttagattgttagattgttagattgttagattgttagattgttagattgttagattgtggaatttggaggttctgatgaaattttggaatctactataaaaacattatgtaaaatagaaaatatgaaaaagttactttacattctcttcataggcattgcgattcaaaatacgtcaggtcaggacctgaaacccgaatatcagaagtttgttaaaaaatttattgataatgtaaaaaatgatagaaaagaggctgtagccgaagctattaaataccctttaagaagagataatccaattccgtctatcaagaataaagcagagcttgtaaaaagatatgctgaaatttttgatactgaactgaaagccgaaatttcacaatcggatgcgacaaaagattggtcagaagtgggctggcgtggcataatgctaaatcagggaactttgtggatggatactgacggaaaagttttctcaataaattatcagtcaaaagtggaaagtgatctcaaaaacaaattgatagcttctgagaaaagtaaacttcacccatcgattgcaaagtttaaagagccacaaattatcatagaaacatctaaatttagagttcgaattgatgacttaggaaatgatacttacagatatgcttcatggtcaataaatcaatcgatgagcgaaaaaccggatttaatcattaccaatggaaaatggtttcacgatggaacaggaggtaacaaccattacgattttaaaaaaggaaattacttgtaccagtgttatattacagttttaggtacaaaagattcagcaccagctaatttaaccatttatcaaaacggaaaagaaatccttaatcaggatgctaaaattgttccacgttaaacattatcctatttcgaaagaatgggattttttgttttattaccccatttcaattcggttacaactattataaattagttatatttgatcgtaattgtcggattaataattaattaaaaatatttaagatgaaaagaagcaacatatttttagtagtattatttttttgcagtgggtttatagttgcccaggattcgaaaatcgattatcagaaattggttaaaaagttcattgaaaatgtcaaaaatgataagaaagaagcgattgctgatgcggtggtttatccgttagagcgagtatatcctatacccgatattgcaaataaggcagattttataaaacgatattctgaaatttttgatactctgttaaaaaacgaaattataaaatcgacgccggaaaagggctggacagatatgggtttgcgcggaattatgttaattcatggcaacatttggcttgatactgaaggacgtttaacggccgtgaattatcaatcgaaagccgaaatagaacttaaaaacaaactaattgcgtcgcaaaagaaaaacctggatcctagtattgctttttttcaagatccggtttgtattctggagacttctaaatttaaaattagaatcgatcatttaggttttaataactatcgatatgcatcgtggtccattcaaaaggaaatgactgaaaagcctgatttagtgattaatggtggagttttagtcgttgaaggtattggcggtaatcaccagtatgaatttaaaaaggatggggatgtttatgagtgtgccattatcgtttttggggaaaagaattctcctccggcaagactgaaaatatataaagggaagaaagtaattctttcgcaggatgcagaaataatagcgaactaaaaaagcccattccgaagaacaggctttttttagttttataaaggttgtacgagaatccaggcatccggattttctcctttttgtatttctttctgtgctttttcggcttcagccattgtagcatagctgccgtagagaacagggaataatccgtgtttgttttcgcctagcattctggcttcgtaaccatcttttactaattgattataagcttttctggcatttttttcgcttctgtatgcaccggccataatgtggtaaggcattgttttttcagcagctgtttctacatttgttgtatctactgagagagttacagcaggcatagggttctggataaagaaagtcgcttcctgaattttgttttctacttttttctgtacactgctttctacaacaagtgttttggcggcgatttgattttgatataaaggatatccgatacttcctgtaattccaagtcctaagactagtatcgcagcatatttcaaaagtggatttgttgttcttccttcttcattttcgtataatgaaattgcatctccttccgaaatttcctctatttttcgctcgaaattctcttttttgactagtggggaaacaaatggacttagtccaaaagaacttgttaggaaattagtttgatcattaggagtgaataccattttctgatcagcattatatcgaatttcaccaatatttttaagtgctacaacaccattttcttctagtgtttttttccagctcacgacttcaaaagcaatggcgcttactgcaaaaccgtaagaagttttttcagcctgtgcgatatgatttgccaacaatccatcattgttttttagataaccgttgaaagagatcatttttgtcggtggaaagaaagaatttgtgctttcattcagctttgccgattgaatttctgttaaaaatgctccaaaccctggaaccgttacacactgataacgatacagtaactgtgctatgtaattttcgattttcatagtaacaaagttacaactacagaatacttatcaaaatgttattcacaatttttattaacaattgctttatttttatagacaattctttttcaaatagttaataggtagtgtttaagtcttgtaggatttgaaacaatatttatatttaaatttaacaggattagactttctttttatgatatttgtgtttcgtatttgaggttttattctttcttattttacataatattttacacggatgccggatcaggatttattctatttattagccttattaaaagtcgatggagttggagatataatggctaaaaagctgcttaattattttggcagtgcagaagctgtttttaaaagtaagggaagtcaaatggctgctattgatggtgttggatcggttttgttacagaattttaaggataaatcggttttcgaaaaagcgaatcaggaaatggaatttatgaaatctggtggcgttaaagtgtctttttttaaagaggatggctatccggaacgcttaaaacattgtattgattctcctgtgctgatttttacctctggaaatataaatttagcaaataaacgaataattagtattgtgggaacgcgccagattacctcttatggaacggagttttgccgaaatttaatagaagaactggcacctctcgatccggtaatcgtaagcggttttgcctatggtgtagatatcgtagcacatcagcgggcgatggattttaacttgcaaactattggagttctggcacatggtctcaatcagatttacccaaaatcgcataagaagtatatggttccaatggaagaaaatggtggttttataaccgagttttggagtacatcaaatcccgataaagaaaattttgttcgtagaaaccgtattgtggcgggtatgactgaagcaacaattgtaatagaatctgctgaaaaaggagggtcgctgattaccgccaatcttgctaatgattacaatcgtgatgtttttgccgttcccggacgtgtgacagacaaatacagtcagggttgcaataatctcattaaaacacaacgtgccaatgtattaacaagtgccgcagatttagtttatatgctgaactggaatgtggaaacaaaggcaaaaccggttcaaaaacagctctttattcatttggaaacggaggaacaaaaggtgtatgattttttgctaaaaaacggtaaagaattgttggatattattgcgctgcagtgtgattttcctatatataaaatttcgggaattctcttaaatatggaactgaaaggagtcattcgacccttgccgggaaaattgtttgaggccgtttaatttggattaaacctgacaggtttttaaaacccgtcaggtttagatgtttatttactaaatcccagaacttctcttactttggctaaaacaccatcggcaattacggaagcttttgaagcgccttttttcagtaggttatctacttcatcaaggttgttcatgaagtaagtatatttttctctttcggttttaaacttttctataatcagttcaaacaaagcttgtttggcgtgaccgtaaccatagtttcctcctaaatagttggctctcatttcggcgatttgtgcttcagttcccagcagggaataaatggcgaaagcattacaggtatccgggtttttaggttcttcaagtggcgtactatcggtttcaatactcatcacctgcttgcgaattgttttatcgtcaaggaaaatattgatcagattgttagctgatttactcatttttccaccgtttgttcccggaatcagtttgccgtcttcctggatttttgcctctggaatcacaaaggtttctcccatttggtggttgaaacgtgaagcgacatcacgagtgatttctaaatgctgtaattgatctttaccaaccggtacaaattcggcatcatacaataaaatatcggcggccattaacatcggatacgtaaaaagtccggcgttaacatcgtctaaacgatccgctttatctttaaacgaatgtgcgagagtcagacgctgaaaaggaaaaaagcagcttaaataccaggttaattctgtcgtttgtaccacatcagattgtctgtaaaaggttactttatcaggatttaaaccacaggctagccaggcggcagcagtgctgtaagtgttttctctaagagttttaccgtctttaatttgtgtaatcgaatgtaaatcagcaataaataaaaaggattcatttgccggattgtttgataattcgattgcaggaataattgctcccaataaattgcctaagtgtggcgttccagtactctgaacaccggtcagtatttttgccattctcgttttttcttattactaaatgcaaagttcgtttttttagagcaaagtgtgtaattttttttagtttctaattattttaaccacagagaacacaaagtttttcacagagtttgcgaaggatttaactttaatgaatgttaaattttttgaagttcacaaagggaatgggtatgtattaatcgttaataacccttcgtataccattttttagaagaatttcattgaagtttataagtaagcctagtttgtattttccaagttttaagtatgttaaagtttgggctaaatgaattgtggttaatgattctacactttttatttcgactacaaattttttctccaccaataaatcaacacgataaccgcaatctagttttacttcttcaaaaattagaggcatcgctttttctttttctacagaaagaccatgttgtttaattttataaaataaacattctttatatgcattttcaagtaaaccaggaccgagtgctttgtgaacctgaattgctagtccgattataattgtagatatttcattctctgtcataatatcaaatttaatacttatttccttataattaattaaattttaaccatagagatagaaagtttttcgtagagaaagggaagttagatctaaaaaaatttaacttaaaatctgttaacttagaaaaagcttttctatttaaaaaactctgtaaactctgtgaaagactttgtgttctctgtggtaaaaaacacgagcgtaaattctttttgtagaattcatttctgatttattacatttgaaaccatgaaaggattaaaagttgttttttgggttttatggcgtatatggttttatattttaatggccattccgatattgattatgctgccgtttttgctagtttctatagcgtcagagaagggttacccctatttttttaaaatggcccgcatttgggctaaatttatccttttcgggatgggtttttattataaagtcgaacgtgaagagaagctggttcgaaataagagctatatgatcgtagccaatcatacttcgatgaccgatattatgctaatgctggctctcgttaaaaatccgtttgtttttgtgggaaagaaagagctttcaaagattcctttgtttgggtttttctacaaaagaacctgtattttggttgatcgaacttcttcgaaaagtaaaaatgaggtttttaaaagagcgcaaaataggttaaatcaaggacttagtatttgtatttttcctgaaggcggagttcctgacgatgaatctattttactggatgagtttaaggacggtgcttttcgtctggcgattgagcaccaaattccgatcgttcccattgtttttgcggataacaaggaaagattttcatatacttttttcagtggaagtcctggaaaaatgcgtgcaaaggtacttccttttgttgctacagaaggattggcagctgaccatagaaaagaactgcgagatcaggtgagacaaatgatttataaagatttactgaagtttaaaaataaagaaaagtaactcattttaaggataaaacccggcaaaattgaaaattgccgggttttcttttgaattaaaattactccattttatattcaataatgcttatctatgaattattttttcagaaataaaacgcaatacttttcttaatttcagtttggtttttttacggtttttgttgtacaacacttctattttctctttcatggttaaaatattttgggttgatactaaagagtttaataaaactcaagttaacgacatactattatagagcgtaaaaaatgaaaaaggttgcgtgaaaaggtgaaaaaaaaaaataaaaacccgttagaaccaaaaaactaacggatttttattgaacaaaccaaccaaatttaaagaaaaacctttgatcagatacttttggctaagtaccagtcaaatcttttgtctcttcataagatggtttggttccggaatggttgcgttagtaaatgcatatttttttaaataaaaaacccgatcatcttttaggaatgatcgggttgtatgtaaagtattgattgtaaatacttttaatgattttaagcgtctgctaattctttgatatgtgctttgattttaatctcaagttcgtctgctaattccggattatctttgatcaaagctttaacagcatcacgaccttgtcctaatttggtatcgccatagctaaaccaggaacctgcttttttaacgatttcaaactcaacagcaagatcaagaatttcacctgttttagaaactccttctccgtacatgatatcaaattcggcagttttgaaaggcggagcaactttgttttttacaattttaactttggttctgtttccaattacattttcaccgtctttaatttgcgaagaacgacgaatatctaaacgtaccgaagcgtagaattttagagcattacctcctgttgtagtctccggattaccaaacataacaccaattttttctctcaactggttgatgaagaaaacggtacagtttgttttactgatggttccggtaagctttcttaaggcttgtgacattaaacgtgcatgaagacccattttggaatctcccatttcaccttcgatttcactttttggagtcaatgcagcaacagagtcaattaccacaatatcaattgctcctgagcgaattaaattttcggcaatttccagcgcttgttctccgttatcaggttgcgagatgattaagttttcgatatcgacacccaatttttcggcataatttctgtcgaaagcatgttcagcatctataaaagcagctattccgccggctttttgagcttcagctattgcatgcaatgttagagtggtcttaccagatgattcaggaccgtatatttcaataattcttccttttggatatccatttactccaagggctaaatcaacgccaagtgagccagaagaaatcgtttctacctccacaatggctctgtcgcccattttcattacggttccttttccgtaggttttgtcaagtttatcaagcgttagttgtaacgcttttaatttggcttctttgtctgaactcatcttttcttaaatgtctaaattgttatttttttctttcaaataaatttaaagaagatactaacttcttgatctttattaatgaggcttatattttgtaaaaatagttcttttttcgaagtttgattgttccaaattgtcacaatttgcactacaagaataaagcctttaattctgtggcatcggaaggatttagttttccggctaacactaaactaagttgtttacgacgcaaagcggcgtcaaaacgttgtatttcaagttcagtttcgggcaatatagccggtacttctacaggtctgccggtatcgtctacggctacaaaagtgtaaatggcttcgttggctttggttctgttaccagattcgcggtcttctacccaaacatcaatgaaaacttccatcgaacttttgaaagatcttgaaacttttgcttcaactgttactacacttcctaacgaaatggctctgttaaaagccacgtgatttacagaggctgtaactacaattcggcgggaatgtctgcgggctgcaatacttgcggcacgatccattcgggctaataattcgccaccaaaaaggttgtttaaaggatttgtttcacttggtaaaactaaatcggttaagatggtaagggactctgatgggtgttttgcattcatttttttactgtaaattttattttttgccacaattttattttttgatttcaattcaattttgttttacgaatgttgaatctgtgacgatttaatttttttattgactttaaagcggtgcgattatgtcagattagttcaaccagtaaaccgccattactgccggaataaaatagatcactatggttcttgcaccgtcataatctttggctaatcgctgtccgaaaagcatcattagcaatgtgatacatgaaaatatagctccgtataatccaaattcccggccactgtcggtgagcaattgtatcgctccgactacacataaaattccggagattaattccataattaaaagatgaagcagggcaagtggtatttggtttttaagtcttgttttggcaaaatgtcctttaagccactcgacattgtctttccagtaaaatattttttcgtatccggattgtaagaaggttaaagctaaaaatgctaatagtaaaatggaggcaacattattcatttgataactattttttgtggattaaacgagtcagttttatagataagtcggttagaattatttttgcatttccgttcctttcgatatgatacattgcatccgaaagttctttgaaaatttcatgaatattgtttccgttgacaaaaggtgcaaaattttcgagtttgaatttatctacttttggttcgatgtacacaagagtaggggcctgatagttaagcatcaaggcttgtcgaaacatttccatgcagaactggatgaattttttctgactttcacgtcccagaccggcaatttcttcactccaggaaattaaatcctgaatagcagctgcatttcctttcgctctaaacgcagcgcgaacccaattgacaaaccattgttcgaaaggtaactctgaatcatcttcttttaaaagatgtaaggccttactaaaatttccctgtgcctgatgtgcaattttaaaagctaatttttcgtcaatgttttctttagaaattaaagcttctgcaattactttttcgggaagtccgttaaaatgaatgacctgacaacgggagcggatggtttgaattatatcttcttcgttttcagaaatgagaatgaaaatagtcttgtctgaaggttcttcaagtaattttaaaagtttgttggaggcggcaatattcattttatcggccatccagataatcataattttgtaaccgccttcgtatgattttaatgaaaatgatttcaaaacttcctgtgcatcttcaactcgaatttctccttgtttgttttgaacaccaagtactttgtaccagtcaaacaaacctccataaggcatttcctgtataaaagtacgccagtcctgaataaaatctaaacttttgggttttgttttgacatcctcagtggtcactgtcggataaataaaatgcaagtcgggatgagagaggttttgaaatttcaaattgcaggaatcatttccgtttgagttttcgtctcctgtgttgttgcacaaaatatattgtgcgtaggcaattgctgttgataatgtgccacttccttccggcccaatgaatagttgtgcatgcggaattcgtccggaagctgcactttttatcaagtgacttttgatgtaatcctgacctaaaatttgagaaaattgcatgaagcaaagatagaagaaaatgatgtagtcaaaaattttagctcaaaagtttatccatacagagtgatttctaataatcatgaagatttcgagctgttttttgacgtttgttaaccaacttttgttaataaacatggcaagatgtggagatattaagacttttttgttaatagttttttgctgtacaatgattaacgaaagctttttttgattactggtagtacgtgttagtttattttttatagccaatatcttaccctttgcgacagagccaattttaactaaaatctcgttaaaacgcacattttctcgacataacgctggtttttaagctttttttaagctttttttttgaaaaaagaaatcaataaagttgcagtttaagttaatttctatatttttgtttttatgaacaaccaattataaactaagaatctatgaaagggaaaattattttattaagtacacttttttttatgacgactggtgccatttcggctcaggcgaaaaatgctccaagaagtataatcagtacaactgctattattcgtaaataccatgatcaaaaagaattgagtggtatgcaaaaaggagaacttttagaattgtacatcgagcgtattaaagttttagtaaaaactcttccttacattgctttggtaacaaaaccgggagttacgatggccgacttaggtattccggatgacaacgaacacaaaaaagtgttagatggtcaggctgttggtacaacaacatttttagatacaacagtagaatttcaaagaaagatgatgccgtattctgataaaggaaacttaatcgctgcaattttattctacgaaagcacattgaaatctttacacgagttcaacgaattgaacgaaatgtaatattatataatttttaaagctttttttgtcaatgtttatatagaggattaaatttatatagatgttttagaaaagaaataaaaaacaactctctcgaaaagttctgagtatgatcagaaaattcgagatgagttttttcatttacgcatacccaaatttattattaactgtaatacccccttatcatgaaaaaaattactcaaatgatctgcgttcttttgacagttacgagtatgagtgctcaacaagagaaaggaattatgggctacaacaattggttgaacaactggaccgaatttaagcctaacaaagtagagtatggagaagcaaaccaaattttagcaggaaatatttctgttaatactaaattgctgaagaagaatatttatgtactgcaaggtaatgtttatgttacgaacaatgcagttttaaccattgaaccaggaactttaattattggtgattttgaaacaaaaggaactcttgttgttacaaaaggtgcccaaattatggctgatggtttagagaccgacccaattgtatttacttcaaaccgtagccagaaaaaagctggtgactggggtggaatcgtaattctaggggatgcaccaattaataaatttggaaatgttggttcttacaacttagatcttgatcctagtttaacgacttacggtggtgataatgctgccgctaattcaggagttttaagattcgtaagagttgaatttgcaggtaaaaaagtaaaaggtgtagacactttcaacggtataacttttgccggtgtgggatctaaaacagtactggacaacgttatggtaagctactctggtggtgactcatttgccttttttggaggtgatgtaaacgctactaaatttgtatcttataaatcaatcaatgacgattacaaatttactcagggtgtacaatgtcgtttgtacaattcattagcagtaagatcttcttatttatcaagtaataaagacggttctcgttgtatggaagtaaagtctttcgaaaagaaaagtgaaactgattttactaaaaaacaaactttagttgttgcaactaatattacgatgcttaatgacagcgaaaacatcaaagctgatattcagtcaggattagtaaaagaagctgtttttgtagctgaaaatgcttctcttgaaatgaagcgtagtgtaatttccggatttaatccagctgttttattagacagtaaaacagaaattaatgatgctaatctaaagaaaatcaaatttgaagaaatgtactttaacctatgtaacggaaatatctttacagagtacaactcaaacaatgaagatttagaaagctggtacggaaatagtgtatttttcaatgtgtattctcaaagtaacaacagagagactttcattgacattttcaaccctaaaaagccggatttcagattacaattaggcaaaattacagcgtctagcagcaacagataatagatttcgatttttatttcagcgtaaattttattaataaagtccccagacataatttatgtattcgtcttaataccggacaaataaagatcaagacataatggcaccatctagaaaaaaatattttatatatataatatttttggttttccctatttcgcttagtttatatgctcaaaataccacagtagaacgacctacttctgctgaagcaataagcgaaataagaggctgtgagaaccaaaaaataaaaaatgctgatccagtatgtatcggcgaattagataattctaatcagttattagcagggctatccatccccaaggatagcctttctatggcagctgaagtgaaagatcagaattcagagtgcaaagaaaattcgtttttaaccggttctttttcagttcttgcaaaggatattatcgagaactataagtacgatttttctgaaacatttattgatatcctcttttttgaagacatagatttagcaagaacacgcactatatgattcaaaaaattaccccaaattttaccaaattagtgcttttgttttctttagttattttaactaaattaaattcatatgcccaaacgccagtgataggaccacagcagcttccctttgagagaatctgcgctggttttattgtcaatggcgttgtgtttaatgaatattttgcaactttcagctacgtagattttcccgctggaacaacttttgccgtagaactttctgatgagactggaagttttacaaatccaacagctactacaacactttcggttacagatgatgctgctttaaaacaacaaacaattaaatttgcggttccgactaatctgaaaggatcggatgtgtatagcttacgcgttaagagcttgaatactacacctgtagtaaatagcccaagatttaaaaacgccgttggtaatacaaccttttctgtttattacagtacttatgtaagttcgttttatattaatgaaaaacagccaacagcgtctttttgtgctggcggtaatcttacactttccgtttataatcctacgccttctgatcaggcttcgtcacctgctaattactccaatctaaaatacaaatggtacaaagatggtgctgtaattgccggacaaagttctaaagatttgattgtaaattctgccggaaaatactatgccgaaattgactatggtttatgttctgatgtaaattttagctcaaatcgtgttgatgtaacgacttcaggatcgggaggatcggcagttaccattagctcaagtttgggaaacccgttttgtgcatctggatcaggaacagttctaacggctacttccggaaatacttacgtttggaagaaagacggagcaataatttcgggtgctactacgcgtagtattaatgcaaatgtatcaggagtttatacggtacaggttgattttggaggatgtagtgctacaggaactatcgatttgaaaagtaatagctttaatgcgagtatagatgcgccggaaaccacatcaataaacgagggggaaactttgaatgtttcggttacaacagatgcttcaaaccctacttttgaatggtttttaaatggaaacgcaattgcaagtgcaacatcaagttcttatgttgtatctattcctggtaattataaagttaaaatttctcaagcatcgggttgtatttcttctcaggagtttagttttaaagttacaggaccaatggcttcgacgacagtgattcctaatgttgtaagtctccagaatccctattggaatgttccggatgtttataaaacagtccagacgaaaataataatcatgagttctaatggtgaaattatgtatgacggtttaggaagtgattataatcctgaaaccaatacgtttataaaagattttaaaaatgttaatccggtatattactatgtcattaaatccgacaatggtgaaaaaaaaggatcaataactgtaataaggtaatatgaagaaaattttactattcatcacactattttacggtttttcaaatacactctattctcaggacaaaaatgaggatggagttgtttcgttttcgttacctattagaaattctttaaagtttaatcgatacttaattaacccggcttttagctttgttcgtgaaacaaatgcttatgccagtttttataataaaagacaatgggtacagtttgagaatgcaccaaacacctatttagccaactattcgggccgttttagagaaaatgaagcttttgcttttggtctgtttcagcaaaattatggtttaatgacggtttttggaggaatcggaaactttgctcataacatcgttttagagcaagacagtaatttaacttttggtttaaatgttggagtttaccaaagcagtttaaataaaggaaaaatcatctcagatgatccaaatattttaaatggagactatccgtcaaacactttacttacggttaatccgggagtaaattatggaacagagttccttgactttggattagcggtaaacaatcttatcctttataatttcggtggcggaattgtaaaagaagaccctgaaagagcgattcagttgcatgctatgtatacaggatacattgatagtttcggtttttttgacagaagtaaattttcaggaattgtaaaaacagaggttaaaaaaggtaagacagtaatttccggacttgcaatgattgcaattccaaaaggagtttgggctcaagcaggatacaatacattatatgggatttctgccggtcttggatttaatatttctccaagtattgcatttgaatacaactatgaaaaaggcatgggaaattttaccaatatgggaggttcgcatgaatttacaattgcttataaatttaaaaataaaaactattactatggtgatgatgaagaaggctctttaatagatccggctaaaccaaaaccggtattggctaaaccatcatcaggaacaaccgctgagagaactgatggtgcagaaaaagcgagactggctgccgatgcgaaggctaaagccgatgcagaagcgctaaaagtgagacttgccgcagccgaaaaagtgaaggctgatgcagcagcggcagcaaaagcaaaattagaagcagacaataaagccaaagctgatgccgaggcacttaagataaaaatagccgctgacgctaaagctaaagctgatgccgcagcagcaacaagagcacaaactgcaacggcaaacagagcagttgctgcagaacaaaaaacacaggcgcagctgaccgcagataaggcaagagcggatgctgaagcccgcagaataaaattggctgcagataataaagcgagagtagatgcagcggcagcggcaagagcgaatgctaataagccttcagcgacgccacaaaaaacacaggcacaactggctgctgataaagccaaagctgatgccgaagcaatgaaattgaaattagccgcagatgctaaagcaaaggctgatgcggaagccgctaaagcaaaaactgctgcggaaaataaaccggcaacagcgccacaaaaaacacaggctcaattagctgctgacaaagcaaaagctgatgcggaagccgctgcaaaagcaaaattagctgctgatgcaaaagcaaaagcagatgctgaagctctgaaaataaaactagcagcagatgcaaaagctaaggctgatgctgcagaagcaaaacgtaaagccgatgcaaaagcgaaagcagaagctgcagacttacaatcaattttagctgcggatgcaaaagccaaagcagattcagatgcgcttcaggcgagactggctgctgaagcgaaagccgctgctgctgctgctgcaaaaacaaaggcaagtatagatgctgccaataaagcaaaaatagctgctgacgcgaaagctaaagctgctgaagaagctgccttaaaagaaaaacaagctgttgaagccaaagccaaagcagatgaagaagccagacaagccagaattgctgctgaagctaaagcgaaagccgatgcagaagctcttaaagcaaaattagctgcagatgctaaagcgaaagcggatgcagaagcacttcaggcgaaattagctgccgatgcaaaagccaaagccgatgcagaagctcttcaggcgaaattggctgcagatgctaaagcgaaagccgatgcagaagcacttcaggcgaaattggctgcagatgctaaagcgaaagccgatgcagaagcacttcaggcgaaattagctgccgatgcaaaagccaaagcagatgcagaagcacttcaggcaaaattagctgccgatgcaaaagccaaagcggatgcagaagcacttcaggcgaaattagctgctgatgctaaagcgaaagcggatgcagaagcccttcaggcaaaattagctgccgatgccaaagccaaagcagatgcagaagcacttcaggcgaaattagctgctgatgcaaaagccaaagcagatgcccaggctcttcaggcgaaattggctgccgatgcaaaagcgaaagcggatgcagaagcacttcaggctaagttagctgctgatgcaaaagccaaagccgatgcagaggcacttcaggctaagttagctgctgatgcaaaagccaaagcggatgcagaagctcttcaggcaaaattagctgccgatgctaaagcgaaagccgatgcagaggcacttcaggctaagttagctgctgatgctaaagcgaaagccgacgcagaggcacttcaggctaagttagctgctgatgcaaaagccaaagctgatatggaagctttacaagctaaattacttgcggatgcgaaggtaaaagcagatgcagaagcaactgcgaaagcgaaagcagatgcagaagcaaaacaattacaggaagcagaagaagctcgtttggcaaaattagctgccgatgccaaagcgaaagccgatgctgaagctcttcaagcaaagttagctgctgatgcaaaagctaaagcagacgccaaagttaaagcggatgctgaagcccttcaggcgaagttagcagcagatgccaaagcgaaagccgatgcagaggctcttcaggcgaagttagctgctgatgctaaagcaaaagccgatatggaagccgcacaagcgaagttagctgctgatgccaaagcgaaagccgatgcggaagctcttcaggcgaagttagctgccgatgccaaagcaaaggcggatgcagaagcccttcaagcgaagttagctgctgatgccaaagcgaaagccgatgcagaagctcttcaggcgaagttagctgctgatgctaaagctaaagctgatgcagaagcccttcaagcgaagttagctgctgatgccaaagcgaaagccgatgcggaagctcttcaggcgaagttagctgccgatgctaaagcaaaagccgatatggaagccgcacaagcgaagttattggcagatcaaaaagcgaaggctgatgcagaagcgacagaaagattaaaagctgaggaagaaacaagacagttgcaattagcagaagaagctcgtttggcaaaattagctgctgatgcgaaagcgaaagccgatgcagaagctcttcaggcaaagttagctgcggatgcacttgcaaaagctgcttcagctccaaaagatgatacagcaaaagcaatagataacttatctcagtctatcgagagcgcaagtaaaatgcagaaagatttattggcacagtttaatacaacagtggcaagtaaacaaagagacttgaacgacttaagagaagagaatgatttaagtgagaaaggaatttataaagaaccaaaacctttcaaaagtgtagcagccgagaacagtcagctggaagctttaaaatctcaacttgctgaagtaaataaagcacagaaagatgaaattgcgaagttgactaatttatacaacgaaaggcttaaaaagtttcctaataaaaacgatgctttgaataaggcttatctggaaaagataaacgagttaaaagcagcacaattgaaaatggaacaggatagcgcaacattactttctaatttagaacgtatcaaggccgagactgaaattgagaaaaaacgtcgaatcaaacgtgcagcatatgagaatgatcagggccgatatgcacaggatgttgccgctcttaaacgtattagagaaacaacgaaattaagcagtacgcctctaacagcaagtgattttgatttcggtgaagaccaatcaaatatgcagattatcaagaatattaagaatgctgatggtggatattatttaattattgcagttcacagcagtgttgaaaaacgcgatcagttcctcgctaaagcagttgcagcaggacgtacagatgttaatttcttttataatgtaaccacaagtaagtattacatctattatgagaaattcgacggactatcagaagctacaaaagcactggaagcaaaagggactaagccatacaacgggaaaatggcaattgtgaaagtggagaattaatataattattgagaatatagccccgttcttcttaatttttttaagaagaacatctattataaatgtttcagaatgctttgatttattttttaacgccccttagaaaataaaagagaagcaaaaacaaaatgaagactatgaaaaaacctactaacctaagattgattttattagctttgattttctttcaaagttactttgtaatttctcagaatcttaagtcatttactccgagatttgacaagaagctaaaaggagacatgttgcttattggtaacaatatcctgaacagagatggaggaaccagaaattccagaccaaatgtcgcttacaatgatgactggcttaactcggatttcgacatgaggtatattgatgtcgataatgacaacagtacttttagttccagtagtgcaactttgacagtgccaaagccggcttgttataaaattgtttatgccggtttgtattggggggctatcctacagcaaaatgatcgtacaggtatagagaaggtaaaacttaaattaccaacagggggctatcatgatatcaatggagagatcatccatgatgctaatgcagcaccaattggaagtggtaataacaggccttatgcctgttatgcagatataacgaacttagttgccggacaggctaatgcgcaaggtgtctatacggttgctaatgttatatcgagtcaaggttctaatggaggaaccggtttatctgcgggctggtctatttatgttgtttacgaagacccaactttgccggcgaaatatatcacttcatttgatggttttagtgcaattggaggtgtaactactttagacattcctgtttcaggttttaagacaatcccaactggtccggtacgtgtaaagtttgcttttgctgctttagaaggggatcagtctattgcgggtgattacctgcaaattaacggaattgggattagtgctacaaacgccgcaaatacagctattagagcctcaaataacttctttaatagtagtgtaacttatgttgatccggctacagataaaacagagaatttcttaaaccgaagtcccgccagtaccaatacgcttgggtatgatgcgggtattttgaatattaataaccccggaactcttttgagacccggaggtattgttattgataataatgagacttcggcaaatattagattaggaagtactcaggacgtttacttttattattttaatgcatttgcggtagatattattgagcctcatattgtactaacgaaaattgttaaaaattcagcaggaacggatattggggggcaaaatgtagtattggggcaacaattaaattatgaaattggtattagaaactcagggaatgatgatgcaaaatctttaaccattagagatcagttgccaattaatattatatttaattatccgggagacttaaacccgcttccggctggcgtaacggtacaaagttatgatcctgcaaccagaagtattgtttttaaagtagatgattctgttgttaaagcaaatacattaaaagagactgtcataagctttaaagttaaagttgttccggattgtaattccttaagtgaagcatgttctaatagtattgataactctgcatatgccacttataaaggaactttaaatcctgattttcaaatttcagatgatccgagtgtcaatacaaatacaggatgtatattaactccaaaagcgactaactttttagtaggtgtcgatggttgtaagtatacagcaaatgttactttatgtaaagacacagtagatttagttgctgcaaacggatatacaagttatacctggtatagtgacgaagcgcgtacaaaacaaatagggacaggacaaacacttacggttaaagatccgggaacttattatgtatacaatttagctgcggcaccttgtagatcaatttatcaggctattacagtaaccagatttggtgctacaaatacaaaccctgtaattccttatgcaaaagctccgtataaaggagaggtcttaatttgtccaaataatggaaaagagttacctaatcttttcttatgtggtgcaaatgattccagactaattgaaacgcatatctcagatggttcaacccttgtttgggaaaaattagatgaagcaagctgtacagcgccaagcagtccaaattgtgccaatgaaggtacttcttgttcttggactcaggttgcaacgggaccaaattacctggctaaaattgccgggcaataccgattaacattaaattatgccggaggttgttttaaccgtttttattttaatgttttcaccaattcattaagtcctacagagaaacataccgatattatttgtggtaaagctggtacgattacagtaggaggtgttcctgccggatatgagtacagtattaatggtacaacttatcaggctagtaatgtatttaatgttactactgcaggcttctataccgtttatataagactagcaggtgtaacaggaaacacttgtatttttacggttccgaatattcaaatcagacaaagggactttaaggtagtacaagaggtaacacagccattgtgttatggtgaaaaaggtaaaattaaagtagccgtaaatgatgctaatgcacaatattattataaactttataataatggaacattattgtctagtgtaggacctgtgccagattctgaatatacttttgataatttaaatacagaccagaattatgttgtagagattactacagatgatggttgtaaagataccaagtatatatacatgggtaaggtttggaacgaatataaagcaacagttgctttagtagaacctcttactgcatgtagtgacggaaaaatcagaatcacaacagaaggaggtaattcgccttataattattttataaacagcgatactgtctttcaaaccagtaatgagtttgtggtaacagctccgggactttataccattaaaattgtagataaaaacaactgtacgataacaagaactattacagttcctgataatacaaaacctgcttatactattgatcataccaatagtaattgttatgatggaagctctaagatagaagtaaaacttactgccggagcaaacgggtacacaatggggtatagtattaatggaggtgctacttttcagtctaatcctgttttttctaatttacagccgggaagttatgatgtagttgtcagatacggtataggaacgccaatcaagtattgtacagatcctaaacaaaaaataacaattacaggaccaacttctgctatttcagcttctgcgggagttgccgctttggccggatgtacattacctgacggtagcggtgcaaaccagggaggtaaactgcgtatcaataatgttcagggaggaacacctgcttatcagtttagttttgatggtggtgttacatggcaggcatcgaatgaaaaagatgttatgccgggtaattttattttacaggttaaagacgctttaggctgtatattcgaaattccttatcagattactttagatccaaaacctgctgacccaacgatcactgtggctgatcctgtttttggctgtaatggtatggcatcaactacggttacggttacaaatccgtcaaataattatacgtatgagtactatattaataatgtacctaatacgccaattacaaataatgtctttacaaatgttccttccggaacacatactataaaggttaaatacaaagttactacggtacctacttacagtaacttgttaagagaagattttggtagaggaccagacacaacaactccgggtattcaccctaattattgttgggaaaaacaagatgctgtagaagattgcggtattggaggttatatgccaattttgcttaatgatggggaatatgttgtgactcaggctctgttgccacagcacgtagctggttttaactggaatctgcctaaagataatacggcagttattaacaatacaccacaaataaaagacggaagatttttagccgttaatgttggaggtgtggtaccaataggtggtgttttatacaaaaaaacgattaatgatgttatcccaaatcaggacatacaggtatcactttatatgcttaacttattaagtaaaaataataatttaccttctccaagattaacgatacaacttcagaaaaatggaactgttataacgggagcctcaaaagatacacaaagtattcctagagatgagaaatggcataatacaactgatcttggaagtggccaggtattaactttaaatcccggaaataatacttctcttgactttgttatcttatcctacagtcaggttatttctggtaatgatttagcggttgatgatatttgggtacgtcagattccggaggtttgtggcgctgagaaagaattcccagttgttattggaaaagataaagcatttaaagcttcaattgtaggtcataaagacgtaacctgtaatggtgctaataatggagaaattacattatctgcacaaaattttgatgccacttatggttttgattactctttagataatggtgcaacctgggtaaattctaaaacttcaccggttaccgttaaaaacttgacgagtaaaacgtataatattttaattcgttatgatgataaggcgggaacatgtagtttcccattcgatcagccagtaggtactcctgctgcattaacaattacggcaagtgttacaaaaacggctacttgtacaaatggagctactattacggctgttgcaggaggaggaacaccggcatatcaatatgaattaagagcagcaaatggtactacagttataactgcattccagaattctggtgtatttacaaatgttcctactggtacctatacagtggtaacacgtgatgcatatgcatgttcttcaagcgcctctgcacaggttaatgttgttgcaccaacaatgccaacagcatctttagcagctactagtgactattgtgttaccgggactaaaggagcaactcttgtggttacggctacaggtacaggagctctaacgtatagtttaaatggtgcacctgcacaaaccagccatacatttacaaatgttggagcaggaacacatactattacagttacagacagtaataattgtccgatttctataaacggaattgtaattgctcctgagttaaaagcagcagcctctattacaaaaacattggattgtacaactccaaatgcaacgattaaagttgacattacggatggtgttgctgcctatacttataaagttaaaaaagacgcaggtgcttatggtggcagtgtaaatgttacaggtaatacttttaattatcctacgccgacagccggactttatacttttgaaattacagattctaagggatgtaaagcttatatagatgctacaattagtccaattacaaatccaacagttactgctaatccaacgcaaattacttgtaatggtcttaaaaatggtagtgtacagttagttggagcaggaggttcaggcggatatgagtacaattttaataatttaggttggtcaacaacttcattatattctggtttagatccaaatattaactattcttatcaggtaagagacagtaaaggatgtacttctcctgttggaaatattacattaacacagccaaccgctgtatcaggaactattggagctactattattaaatgtggcacaccaagtactgtaccggcattagttacagttactggttctggtggaaccggtgcttatacttacagtttcaacggaacggcaaactttacaacaacaaatacttactcaacaacagctgccggaacagttacggcatatgttagagatgcaaataactgtcagtttgggccattgtcaattacaattggtgctttagaaccaattacagatatcactattgttgatagcggatatgattgttctacggttccggctggtggacgtgtaactttgacagcggtaaaaacaggaagtacagcaaatattatctatcagattatttctggtcctgcaggatttaaccctgcgaccaatacaaccggaaactttttatcactgactccgggagattatatcttccaggcaactgatacggttactaattgttcattcacaaaaggacataccattaaagcaacgtcagatattattacaggtggttcagtacttacaagtattcaatgttttggttctaccggaactattgaatttacagtaaatggtgttaaggcaaacggatatgattatgttattaaaaacgctgccaatacaatcattcagcaagcaactggtgtaagtgcagctacaactaccgttgcagttcctactgctcagcctgtaggagcgtatacgattactgcaacagacagattaacgaaatgtcagtcttcttatacagtaactttaacgcagtcagctgcagctgttgatgttactgctgtagccactacagtaaattgtaacaaatttacagctgagattacagcaaccggaacaggagggacaccaaattatacctatgcagtagcaagacaaggtgctgcagttcctacagtttatgcttccaataatgttttaacagttaatactgttaacggaacagtattaaactgggtggtttatataaaagatgcgaatggttgtttggataatttccctataaaaattgatgttgatgctaaaccggttattacaggtgtggtggttgacaatcaatgtcagacaggatcagttgcaagttttaccattacagctactgctacgggattagtacctttaacgtatagtattgatggaactaatttccagactagcaatacttttacagtaagtgctggatcttataccgtaacggtaaaagataaaaatggttgtacaacagctgctgcagttcctgtagtggtgtatgctaaagttggtgccttagcagaggttactaaagaattagattgtagtgcaactccaaatgcaacaattaaagttgatattagtggaggaaaaactccatatacttatactgtagcgaaaggcacaggaactcctggtggagttattaatgttaccggaacatcgtttacaatttctgttgcttctgctaatgctgataaatatacatttgcaattacagatgcaaacggatgttctacgacaacatctgcgactgttgctcctattgcacctccaacagtaactgctgtaaaagtagatgcttcatgtaacgcttctgcaacaggtacagttcaattaacaggtgctaatggttcaggtggatatacctatagtaaagacaatgttacttatacagcgacttcattatttgaaaatctgttagcgggtaactacactttctatgtaaaagacagtaaaggatgtaccggaagtgttaatgttacaataggtgaacctgcaaaattaacagcaggtgctactgctactaactttacttgtagtgttaccaatacgaaacaatctgcgactgttaccattacagcaacagatggtacagctccttatacgtacagttttaacggaagtggatatactgccgcaaatacgttaacagtaaacgataacggtgcagatcaaatcattagctattctgttaaagatgctaaaggatgtaccactgcggttcagcaaattaccattaagaaattagatcctcctgttattgtttcaatatcaggtagtgcaattctatgctcaccatctaccagtactaccagtactgtaactgttacaacaacaaatggagtagggactttagcttatgttattacagcaccagcttctgcaacttcaaacgtaacaggtgcaacgactggagtatttacaggattagtggcagacacttatacttttaaagtaacagatgcaaacggatgttttgctattcagtcttatacagtacttccattaactccaattgcagttgctgaatcaaaattaagcgatgttttatgtaatggaggaaatacgggttctgcaaaattcagtatttccggatttagtgctacaggaaattataccgtagcagtaacgtctactcctgcaggattaccttatacaacttcaacagttggagatgtgattaccctaaacggattagttatgggaagttatactttgacagttcaggacaaaacaacaaattgttcggccggaaaaacggtaaacatttcacagccggcacagccattaaatgcaacaattgcaattgtaaatgctaattgtaatgttccaaatgcaaaagtaacagttactgctacaggaggaactgccgtttacagatatgcatttgtaccagacgggactcctgtaacggcttatacaaacagtaatgttgcttatcttgatcctgcgactgcagattgggatgttcatgttattgatgcaaatggctgtacagtacaaaaagatattacaattattaaagatgcaacgccaaccgttactgcttcggcaaccggagaatgttttggtgatggaactgcatttgtaattacagctactccgggtgctggtactattgctccggtaaaatacagtattaataatggagcttctttccaaacaggaaatacatttacggttacaactccgggtaattatacagtaattattgaggatgctaatggttgtagagcttcaagtacagctgttacagtttttgataaattaactttatctgctaaactagataaagatattacttgtaaagctcctacagcagcccgaataactttgactgctaccaatgggaacaatgctttatatacttatacaagttctcctgctacaggaacttttacaggaaatgttttcgaaacaaatacacctggatcatatacttttacagtaacagatgccaatggttgtaccgcaactacaacggcaccaattgtggtgaatccaacagttgatccggtaattactaatttgagtactacaccacttttatgtcatggtgattcaaatggtgctattgtaattacaattgataatacaaaaggtttagctccatttgtttataaggttgtaaataacacaacaggtaaggattatggtactcagacttcaggtctaacagccggagattatacggtaacagtaaccgatgcaaaaggatgttttgctactcagaatattacgattgctgagccaactaaaattgttgttgactttacgcctacctcaattacatgtgatgcttctaatggggaatctcttggtaagataaccattaattcggttagtggtggaactcctgcctatacttatcatgttacgggagtaaatggttataaccaacaaatcagcgggcagacaggtgctgctgctgtttttagagtggttgattttggtttatatcagattattgttactgatgcaaacggatgttctaatgtgataaaagacatattgattgcttcaccaccaaaagatttagatattaccgtaactcctcctcctgcagattgttcttcattgggttctgcagttgtagcaattggagcgggatctacaaatataaccggtaatggtcctttccattttgcagtttatactggtccgggaatggtgtatactgctcctacaactttgccttggtatgatgaagatggtttccaaagtaaaaagacatccatacctaatttattaccaggtgttaaatatacctttatagtacacgaccagggaacaggctgttactattatgaaacagcggaatttatgattcctactaattcaacattaaaagttaataatgtagtagaacaaaatattacctgtaaaggagctaaagatggtaaagtttcatttacgattgatagtacttatccgtcagcgacaaatgtaacgtatgaaattttaaattcactaggcctaacttctgtggttcctccggcgacaggttccggaactattgcagccaatggaactcttacagttactgatttaggtccgcttccttttgggaattatatcattgtggttaaagaaactgcaggatcgacaaatgcaggatgtagtgttgccagcaaagaatttaacattacagaatctgcaattgacttgacagttacggtttctgttactaaaaatgcaaattgtaacgctgcttcaggtgttataagcgctatcggtcatgatggtacagcaccatatacctatcagttattattgagtactgatccggtaccaacagcggcaactgcaggctgggcaccagataacacttttaacagagatgcgggtgattatattgtttatgtaaaagatgcatacggatgtataaaaccagcttctattacattagttaaagatgcagatccaacaatcgttgctcctgctacacctatttgttatgatggtactccatttacaataacgtatagcggaacagtttctaaagctcctgcgatgtatagtgtaaacggaagcgctttccaggcaactccaagttttacatttaatgctgccggaacttataatctggtaattcaggatgctaacggttgtacggctaatgttgactatattgtatatcctcaattacaaataaaagccgatgttactaaagaactggattgtacaacaagtcctgctgctcaaattacattaacagccagtggaggaaatacaactcctgctgcttcgtatgtttatacttattcatacaatggcggagcatttttaccaacgacaaacgtacattcaacaagtgcattgggagattatatttttagagtaacggatgctaataatacaacactttgttatgcagaggtacctttcaaattagaagcaattccttctccaacagttacaacatcacatacaaatgttagttgtaatggtggagctgatggatctatcaccgtaaatacaacttctggtgtgggaccatttgagttcagttggaataatggtacgatttcatctccatttcaaccttcaaatatatttaaaggtttatcggctggtaattatgtaattacagttagagatgctaaattatgtctttatttaacagctccggttgtaataacacaaccagtagctcttcatgccggtgcagctgttaaagattatgcttgtacaggtaatgttgcacagccagctgtggtaacagtaaatgttacagcaggtacaggaacagcaccttacaaatacaattttgatggttctgctaactattttgacgctaatacactaacagtattagacaatggtgctgcacagactattagctattatgtaaaagatgctaacggatgtttgtttaatagtacagtaacggttaatccataccaaaaaattacagacctaaactttgcgggtgctgcaattacttgtaacgctcctgcgacaagtattacagttactgtagcgggtggatatgcgattacgaaatatgaaatcgtttcaccaactgcaaacgcagttgataacggaacggtgaatgttttcaatggtttattaccaggtacctatgttttcaaagtaacagatgctaatggatgttcattccagaaatcattgacaattaaaccagtaactaatattaccgtttctggtcaattaataaaagatgtaagttgtaacgaaacagcagctgttgctaacggttctgttgagttcactgtaggtaactttgcagcaacttatacatattctattaacggagttgcggttgcaggaacacatactaatcctaaagttacccttaccaatttagcagtagggaactataaaatagatgttgttgatgtggctacaggctgtattgcaacagcaaatgaggatgttagcgaaccggcaacgccattattattaacactggattataatatcaatgcgaattgtaattttggtgcaaaagtaagtgttataggttcaggaggaactcctggttatacttacgcttacgctgagagcccaacagcaccggcactgggagcttataaagcgagtccaagtgcagttttagatccatctaaagtttggattgcttatgtaagagatgataacggatgtattgctcagttaccattgactattgcgacagatcctctgccaacaattgacccaattacgggtgtttgttacgatggttctcctgtaaatgttactttggtaggccatggtgttggtccattaacgtacagtattggtaatggatttaaaacaagtcctgactttgtacttaacgcaccgggttcatacactttctacgtgagagatgctaacggttgtgatgctgcaattccatatgtttatcaattggatcagaaattgttattagacgcggtacttcaggatttaacctgtgcggctcctaatatggcgactgttacattaacagctacgcaaggatctactttgtatactaactatgaagtttcatttaatggaggtggttttacaccaacaacatctccatacacaactaatattgcaggaacctatacttttagagttacagatagtaaaaactgtcagtcagtttcaaaaccagtagtcgtaaatcctattgtaatgcctactatttcaactactccatttaatgtaagttgtaatttaggaaacgacggaagtattacaattactgctggtagcggacttgctccttatgaatatagtattgatggtacaaattaccaggcttctaatatttttggaacattaggtcagggtacttatacggtatacgtaagagatgctaaaaaatgtgtggttagtgaggttgttacaatttcacagccgactgttttaggtgctactgctgcagttactccatttagatgtaatttaactaatgcaccagatgatgctatagtaactttaacggctactaacggtactccaggatacaaatacagttttgataatggtgttacttttggagatgcttcaacgttaaatgtaagcactataacggctaataaaacagtgttttacgtggtaattgatgctaatggatgtagagtttcaggaaatgtaacggtgatcccttacacaccgcctactgatatgaatattacagcaacaccaatttattgtaatacagctggaggagtttctactgctaccgtaaatacagtaacaggtggtgtagctccttaccaatacgatattgtttcaccggcaacggctgttactaacaatacaaccggtattttccctggattgttaccggatacttatcaaattaaagttacagatgctaatggttgtagtacaacaaaagcgatcgtgattaaagaatctgataagattgaagcgactactcagttgataactgatgtgtcatgtaatggagtaagcaccggtacagcgtcatttgttgtaagcggttatattactcctgctgattatatctattcattagcaccacttgctggtacagctactaaaacgggtgatgttataagctacactggtttagctgcaggtatttatacgtttacagtagtagacaggatatctggatgtcaggatcaggtggtaaactttgagattaagcagccattggctttagattttacatctactgctaccaatacaaattgtaacgataaaacggctgaaataactattgcagcaaccggaggtactcctgcttatcgttatgctgttgttgtttcaggtgcagcagctccaacggtttttggaaacaataatgttatagctgttgatacaaacaatggtgccaatagaaattgggatatttatgtacaagaccttaacggatgtccggtaatgaaatctcaaaatattgttgaagatgtattaccaacaactccgtcagtggctccatttagtcaatgtccggatccattaaacggaatgtatacctttacgattactggagttacaggtgtagcaccaatcgaatatagtattggtaaaggtttccaaagtagcccaacattcaccgttaatgcttcaggtacttatgatgtaactgtaaaagacggaaacggttgtgaagtaaaaacgacggcagtagtgaatattttcccagctctgactttagatgtggagatcacagctttaccagactgtaacactaacaatggagctattaaagctacagtttctggaggtgctaaccctgcaacccctgcaaactatagctatagtttaaatggtaactttggtcagacatccggagtatttaccaatatcgctcctggaaaacatacaattacggtaacggatgtggctacaggttgtactagaaccgttcaatttgaaatcatacctgcgactccaattaaaggatttactttagcacacacagatgttacttgtaatacatttactaatggaacgatcactgcaactattgatgaaacaggtggaaatgacaacccaatttactattacagtatcacagcgggaccagttcttagacctaatcagacttcaaatgtgttcacaggattgccaaaaggtcaatatacagtaaccgttacatctggaagaggttgtaaagatttagaagatgttgaaattcttgagccgactccaattgttgttacggattttgtatttactcaatttggttgtacagcaggaacaaacacaaatacaaatgcgacaattacagtaaacaaagtagacggaggatctggtacgtatgttttatatcaattcatgaaaaatggagttgaagttcaaaatagtacttcaaatacttataccgtatttgatcttacaggaggagattatactgtaaatgtttatgatagtaaaggatgtgttggatcatctacaggattaatgaaaattttgccttttattagcttagacaatattacggtaacaatagataaagaaattacttgtgtaaacaatgaggacattactgttacagctgcggttagtggtggtacaccgacaccgacacaattgttatacagcattagaggaataggcggaagcacttttacagctaataatacaacaggagtgttcacagcattgccaattggtaattatttaattactgtagaaaatacagatacaaaatgtataatagagaaagcgcattatgtagctaatccaaatacattcgaaattaaagctactccggtagtagctgaggtttgttttggaactgctaatggaagtgtgaacctaacttttgttgataatcaaaaacttccaagcgatgatgcaggtatatttgattacacgattacaggtcctgtaaatgttccattaactcgttcagcaaatgctggtccggtttctattacaggtcttcgtgcaggtcagtatacggtaaacgctactttagtaggcaaaccatattgttcagtttcaactattttctcaataggacagcctagtgcggctttagtggtaacaacaacaaaatctgaaatcacttgtgtggcaggtaataatgatggagaaatttcagcttccgcaacaggtggttgggatacgaattaccaatatgacttagtattaaacggaacagttatcgcaaataacaccaacggtaattttaccgggttatcagcaggtaattacaccgttattgctaaagatggaaaaggatgtcaggcatcagcaacacaatcattgaagatcccggatccaattgtggttagtgcaacagcaacagcttcagtattaccatgttttggagacagatcaggtatcattacagtaaaccctccaacaggtggtcagggaagtaactatatgtacaccttgaacatgttgtcagagaatccggtgatttcatcaggtccacaaagtaaccctgtgttcacaggcttaccggcaggaacttacagtattacagttacggatggatttacttgttctgcaacatctgcaaatgttgtgattacagagccaacagaagtagttccaagtttagtgctggcaacgacacaaacttgtaatacacaatcaacacttacgttaagtgcaacaggaggttctggtccatatacatacagtaccgatcagacttttacaacaacaactggttcatttgcaacttctcttaccttcgcggtaccagtgggtaaataccaatattatgtgaaagatgctaaaggttgtgtggcaaaaatttctaacgaagttaaaatcgatccattagagccattagtaatagatttagatgttaccaatgctgtagtaaaatgtatgggtgaagctacaggagttattgtagcaaatgcaaaaggcggtttaggaaactatatctatactttagaaaataatacaggtgttgtggttagaccggcacagcctagtggcagattcgaagatcttccaatagggacgtatgttgtaaaagtagctagtggtgattgtcctgcgacatcaggaactatcgaaattaaacagccagctacagctattcaggctacatttacaccaaccaatgtttcttgttttggagaaagtaacggtcagattgtagttgctgcaacaggtggtacaggaattattaaatatgcaatatcaccggatttagatcagtttgatgttaaaaacacttttgataaacttgcaccgggtaaatatacggttatagctcaggatgaaaatggttgttatgttatcgatgaaatcgaaatcactcagccaaaacctttaatcgtaacagaacttccaaactctatgattccggaagtttgtaaaggagataaagacggtgcattcagtatcgaagttaaaggaggtactgcaccatatagcgtaagtcttgacaataaaaacggaacgtatactcaaggtacggcaactcaaattatatttgattttactaatctttcaggaggagttcataccgtttacgttaaggatgctcagggatgtgtgaatgaatttgtagaaaacatgcctttaccggttgttcttgatccaactaccgtaaccaattacgattgtgtgaacaacgctcaaacgaatatggtaaccgtaacagttgatgctagtaatacagatcttacacaaatagattattcacttgatagtgatgtaggtccttggcaggcagcaaatatctttaccaatattgctcctggaacgcactacattgtagcgagacatacaaatggatgtaaagtgccaacggcaagttttgaaatcagagcttatgagaagttaacacttgctgagtcaacaggaaaacctgaaatgaacatcatttcagttactgctgccggtggagcgccagcttacgagtacagtttcaacggagagccgtttacttcttctagcaaatacaaaatctacaaaacaggagattatgtagtagtagtaagagatcaaaacggatgtacagcaacaattacagttcatgcagtttatgtggatgtgtgtcttgacaactactttactccaaacggagatggtgtttatgatacgtgggggcctggttgtacaaacatttacaacaaccttgaattctcaatcttcgacagatacggtcgtgtaattgccaaataccgttacggacaaaaatgggacggtagatacaatggtgccgaattaccatcaggagattactggtatgttcttaaattaaatgacgagaaagatgcacgtgagtttgtaggacatttcactttatacagataacaaaataagagcccctaatgatgttatctaaaaaaattattacaatgaaaaagtttattttatctttagtactcatggctgtaacaacaagttacagccaagagttaaacctaccggtttttacacagtatttagccgataatccttttgttatctcaccggccttcgctggtatcggtgataaccttagaattagagccaatggacttacccaatgggtagggataaaggatgcgccggacaaccagtcgctttatgccgattttagagttttggaccgttcaggagtgggtatcaatgtgtacaatgataagaatggatatacgcgtcagactggagctaagatctccttcgcgcaccacattattctggattattattcaaaacaatacctgtctttcggactttcgtacaactttaatagtttccgtattgatattgacgaattcaataacaccattgagcatcctattttagatccaagtgtaaccgacaatcgatataccgcaaacagcaacttcgatgtaagtgctttgtaccgtaacaaagcattctatgtcagttttaatgcgaacaacgtactaaagaaaaataccaacaaatacagaggagtagagcctagtttactttccaattatcagatatatacaggatttatttttaaagacggagaaaacagccgtatcgaatacgaaccatcgctttactaccagtacttcgcaagtgataaacgttctacaaccgattttaacttcaagtacagacgttacaaccgttacgaggattattactggattggagtttcgtatcgttttttaaacgatcagttcccaaaaccattatccgttgggccaatggtaggttttatgaaatctaagttctactttgggtattcgtatcaggtaatgtttaacaatttaggcaattacaacacagggacacactcggtaactattggtttcgatttcttgcaagccattagcaactgtccttgtacacaaagtccggttcacgactaagcaaacatttttagcgtttttaaagttaatttgtttttttttctaaattatatcgttttcgctgttagagcgggtttatttttatatttttcaaatttgttgcaaccctaaaagttctatatttgtttttctatcagaaaaaattaaaaaattatcaaatgaaaactctaaacgatttcgactttaaaaataaaaaagcaattatccgtgtggactttaatgtgccattggatgaaaactttaatgtaacggatgctacgcgtatcgaagcggcaaaaccaactatcgatgcaattttagcgcagggaggaagtgtaattttaatgtcgcatttaggcagaccaaaaggagcagaagataaatattcgttaaagcacattttaaaaactgcttctgaaatattgggagttcaggtaaagtttgctgaaaactgtattggagaagcagccaagactgctgctgctaatttacagctgggagaagttttgttgcttgaaaatttacgttttcacgctgaggaagaagccggagatgttgcttttgcaaaagagttagcatcattgggagacatttatgtaaacgatgcttttggtacagcacacagagcacacgcttcaaccacaattattgcccagttttttccaactgaaaaatgttttggaaccttattggcaaaagaaattgaaagtttaaataaagtacttaaaaatagcgaaaaaccggtaacagcagttcttggaggttcaaaagtatcttcaaaaattaccgttatcgaaaacatcttagacaaagtagatcacatgatcatcggtggcggtatgacttttacattcgttaaagcactggggggtaaaatcggagaatctatttgtgaagatgacaaacaggatttagcacttgaaattttgagattagctaaagaaaagggagttcaggttcacattccggttgatgtacttgcagcagatagtttttctaatactgccaatactcaggtagtagaggtaaacgcaattcctgacggatggcaaggtcttgatgcaggtcctaaatctttggaaaactttaaaaaagtaattctggagtcaaaaacaatcttatggaatggtccattaggagttttcgaaatggaggcctttgctaaaggaacgatcgctttaggtgattatattgctgaagctacagaaaatggtgccttctcattagtgggtggtggagattctgttgcagcagtaaaacagttcggttttgaagataaaatgagttatgtttctaccggaggtggagctatgcttgaaatgttagaaggcaaaattttacctggaatcgccgcgattttggactaaaaaatcacaattaacatttttttacatagttttcttcaataaactgtttaagtttgtaaaactaaggtttctgtaatttgttgaattatagaattttaaaaaaatgttatatgattgtaaaaaaaatagcaatagtggtttccgcttttttttcgatttctgtggtcgcacagaatgtggcaaaagcagatgctgaaattaaaccggttgtaaaaatatcgtatttagattctgttaaaagtaccttcaaaaaaaatgaactggcaacacgtgttgacagtctttggatgaacgaattagtaagtctcgatatttacgacgatttaacaaaagatattcaaaccattaacacagatgtaaccgttgatgaagaactgcctacagatttgctaaaacagcgattgcaggcaatgaatgggaaatcaccttttaatattgaatacaatcagggattagaaaacatcataaagtcatttcttaagaatcgtaaaaaatcgttttcacgattaatgtctttatcagaatattactttccaatttttgaagacgcttttgccaaacaaaatgtgcctttagaaattaaatatttagccgttgtagaatctgctttaaatcctaaagcagtttctaaaatgggcgccaccggactttggcaattcatgtacggaaccggtaaacaatacgcacttaaaatagattcttatatcgatgaacgcagtgatccgcttagagcaactgccgcagcatcagaatatatgactaaaatgttcagcatctttggtgactgggaactggttctggcctcttacaactcaggacccggaaatgtgaccaaggccattcgccgttccggtggaaaaacaaaatattgggacattcgaagccatcttccaaaagaaactcaaggttacgtgcccgcttttttagccaccatgtacctttttgaataccataaagaacacggaattaatccacaaagagccgttgttaaaaattttgaaaccgatactgttcagatcaaaagccaaatgtcattcaaacaaattgctgatttgttagacatgccgcaatctcagattcagcttttaaatccatcgtataaactaaacgtagttcctttttatcagggagaggagcattatctgcgtttacccaaagagaaaattgccacctttgtttcaaacgaagacaagatttatgcctatgtggcttaccaatcgcagaacaaaaccattccggttcaactggcgatgaggacagccccaagagccaaatacatggcgaaagccaaagaaaaagaagaatcctctaaagaaattcagttttacaaagttcggaaaggtgataatctgggagcaattgccgaaaagtataacgtaagcattgtagatctgaagaagtggaacaatctgaaatcaaactcagtggcctttggaagaaatttaaaaattaaatctgaaatagaggcagttgttaaaaatcctaaagaagctaaagcaacattggcaatagataaaaaatcagaggaagctattgcttcagcagatgataaagataaaaataatgcacaaccacaggagtatgtagtagctgccggagacaatttaggcagcattgcaaagaaattcggtacgactattgcggagttgaaagaacttaatagtctaacttcaaataatattggtttagggaaaacattagtgatttctaaagcagttcctgaaattgtagaggagaatgctgtaacaaccgctattgcgtcaaacaattcaattgattcgtttaagaaaaaagcaacgtcaaaagctttgggtgaagactattatgttaaaaaaggagattcgttgtatagtatttctaaaaaatatccaggagtgactatttctgatattaaaaaatggaataatattaaagacggagacattaaacccggaatgaaacttaaaataaacggataattcaaaatcttatataaatttgggttttatttcataacttaagagaatgaataaaacccattttttattagtactacttccgctgctgttcatttcatgttttaaaaatgacaagcagactgaaactgtgtctggaaaaaccaataccatttccgtcattatagacgatcaattgtggtatggcgaagtgggcgacagcattcgaaataaatttgcctcaccggttttaggacttacacaggaagaacccatatttaccatcaatcagtatccggctcgtttgctggaaggttttgttaccgacagtcgtagcattattgtggtaaaaaaagccaccgctgataagttcgaagtcacacacagtgcctcgctgcctcataatacttttagaatttacggaaaatcggtagatgatatcatttgcagtatcgaactcaattccgcacaaattatcaaaataatccgcgataccgagatcaaaaaaattcaggaggacaacagtaaatccctgttgaatccggccattataaaaaacaagtttcatatcgatcttcagatacccgttggatatgaatacatgttgcacaaaaagaactttatctggcttaaaaaagacatcattagcggaaataccagtctgctcatctatcaaattccgattcgcagttttgagaaaagttcaaatgtagtagacaacattatccgaatgcgggattcggttggatattatatcaaagggaaagaacccaaaacacgtatgattacaggagaggcttatgctccctatttctcgacgatttcattagatggaaaaaaagcttttgaaaccaaaggtacctgggaacttaagaatgattttatggccggaccctttattaactatgccattgtcgacgaaatgtacaaccgaattctggtaatcgaaggattttgttattccccctccaacgaagaacgtgatttaatgctggatctggaagcaattataaaatcggttaaaattgataaaaggtaaatccgtcgctccgaaagagcttcagctaaagcatagtgcaacgcgctatgaagcatgtaaaagtttgtttacgccctgaaagggcaaaagcccaataccaaaattatcaatttgtagctttttatagaaatactgttaagtttttagtaatgaggtgacaaactaatttttcttaattttgttttacaactaacattaaaacagaacattatgaaaaatttaattgcagtattagtactagtcatgtgttttgcctcctgtaaaaaagaggccaagacagcaactgaaacggtcggctcttctgatagtattaaaaaagaagaaccaatagcagaacagccggttgattcggctgcgcaaatgaaagcctggcaggagtatgcaaccccgggggctcctcataaattaatggccgatgaggttggaacctggaattgtgacatgactttctggtctgaaccaaacgggaaacccgaaaaagccacttcaacagcaaacgttaaaatgattcttggaggacgttatcaggaatcgaactatcagggaaccatgatgggacaagcttttgaaggtaaaagtacattagcttataacaatgccagtaaagaatacaccaccacttttatcgacaatatgggaaccggtatgctggtggccatgggtaagtacgatgaaagcaccaaaagtatggagctaaaaggagatatgattaatcccgtaaacggtaaaaagaccccctacagagaaatttataccattgtggatgctaaaacacgtaaaatggaaatgtttgatgtaaaaaatggtgaagagttcaagagcatggaaatcattatgaagaaaaaataagattctccttccatcataaagtataaatcccgattgcagtttgtaatcgggatttatagttaagaatatttggtataattttgtttttagtgtaagttagaaccgtaaacaataagacaaaacaataaacaaagatcaaatggagctaaaatggaaaataaagccttttgaggcgttaaatgtaaacgagctatacgatttgctcaaattaagaagtgagatctttgtagtcgagcaaaactgcgtttatttagatcttgacggtaaagacaagaaagcattacacctgattggcgagtacgatggaaaaacagtagcgtatgtgcgtttattcgatgcggggattagttttgacaatgcttcgatcggacgtgtggtggtagatgccaattaccgcgaccgaaaatggggacacgatctgatgcgcgaagcgattgcggctataaaatcaaattttgataaagatgcgattacgattggagctcaattgtatttaaagaaattctacgaaagccacggattcgtgcaaaccagtgaaatgtatctggaagatgatattgagcatattgaaatggtaagaggttgaccaaagactcaaactaccgattatagtagtggtatctttatcttttaaaattctatcaggagtataaacccttatttacttacttaagtagataagggttttttttatgatttagataacagtttcgagtactggatttatttaatttaggttttggtagaggtttagtaaaaagaataataaatgaaaagaaaagtactggtgtttgtgtttttagtttttggtgtcttgagctttgggaacggtaaagggataagtagcaatgaaaatcaacgtatcgaaaatctatcgagtctggcaaaaatttggggatttctaaaatactaccaccctaatgtcgctagaggcaatttcaattgggatgagcaattgattatgatgattccaaaagtggaaggggcaaagaacagagaagatttatcaaaaatctatctggattggattacaagtttgggggttgtcaaagaatgtagatcatgtcagaacatatctggaaagagttattttgataaaaacttcgatctttcctggatggataatttagctgtttttacaccagagctttctcgaaaacttagatacattgaagaaaatagagcacaaagtaatagcttctatgtcaccaaaagcccaagagaaaatgttgaagtcagaaacgaatcaaaatataaagattttgaatatccggaaaaaaattatcggttactaagtttgttcaaatattggaataccattgaatatttctttccgtataaatatttaacggatcaaaaatggagtacagttctggaggaaatgattccaaggtttgaaaaagttaataacgcaactgaatatcaattggtgttgcttgaaacagttattaaaatcgacgacacacatgcaagtttgtatacgaataagaattttgagttttttggtaaaaagtacattccggccttcagtaatgtgatagagaataaagtcgttattgttgggatttacaatgattcactcgcgagaataaatgatatcagaaaaggtgatattattgaagaaattgacggtaagaatgcattggaaataatggctgaccgaaaaaaatacgtaaacggttcaaatagtaataccaaagctaagaattataactaccagttgtttaatggttcaacggattcagtaaaagttaaaataagaagagataatgattttgtattaaaaacagtaaaacggtataaaggatcagatttaaaatcaaatttgagccgcaccaaagaaaaatttaatctggatgcaaacgacattggatatatcaatttggctaatatagaagtaaatgatcaggaagaaattatggataagctgaaatcgacaaaagctttaatcatagatcttagaaactaccctccattgatgccttacagaatcgccagaagattaagttttgaaagtaaggagtatgtgaagtgtatagcgccagatttaaaatatccgggaagatttttttggaaaaaatctcttgtgatagagccattaaaaaaatcatattatagaggaaaagtagttttgctagttaatgaagagacccaaagcagagcagagtttgtgactatgcttttacaagcgggtgataatgttactactattggtagccagaccgcagcagcggatggtgatgtgtcccgacttgaattttctggctttgtaacggctataagcggactaggtgttttttaccccgatggaactgagacacaaagaaaaggggtcaagatcgatatagaggttcgtccaacagttaaaggaattcaggaagggaaagatgaggttttggaaaaagcaaaagaatatttagtaacagaaaagagctagaagattattgtttttaaatcttagtaatcaaaaattcaacacgacgatctagattttcaccttttcccagcgggtatttatttccgcaaccctgataagtcattcggtttttggagattttttttgagctgaggtagtgaaaaacagttttggcacggttccaggaaagtcttctttcattggtggctcggtcaattccgtcggagtagatatcaggggtacagcaaacatgacctctgatttcgaattttaaacccttttgtttttctaaaattgcggcaactttatctaattcttttttagaatttggagtaagttttgaacttccaatatcaaacaaaatattgtctaagaagatcttgtcaccaattttaagtttgttagggaatgagttgtaaattcctttaccaaagctgtttttctttacagcaattaagtcaacccgccgatttcgggaacgggtttcgtgtaaattttcgatagtgtcaggccttagaatcacacggcctttgccttctaaaataacaattttgccatggttgaagcccgcgcgaaccaagaagttctgaatggttgccgcccgattgttagacaaacgaaagttgtattcgtcgtttccgcgatcatcacaatagccatatatttgtaccgactcaactttagaggtgtcgatatttttaataaaacggtttacaacttcggtttgttttggtgtaagatcgaacttgtcaaattcgaaataaatggtttcaataggtttttgctgtgccgataaattgtaaataagaaacagaaataggggtctgtaaagtttcattcttttacatttttaaaatcgttttatactcggtttggttatttaatacatttactgcttttttaatttctgaattatttttaatgtaatattgatacaagccttcctgatactgatatcttttaatcagttcttccagtatcaggtttctgatttccttttgatttttatccagtaaagtactttcacttttttcaagagctgcctgtaactgttggtattctgtagcaatagtttcgtcgattttttcatttttggctgcagccatcatattttttaacgccacttctgattccgtgtcaaaactaattttgttggttttcaggaactgcttgaaactactgtaatcagcatcagtaaggattggtgttttgtctcctaagtttggattcttgtaatagtacgtagtagcataatcaaagatcccgtcattttttagcaaggccgttgtaatcggactcattttagtttcgtccagttcgatatccggtaaaacaccaccaccatcataaaccgttcttccttttcgggttttaaaagcattaaagtttttagcatccgttttttgcgctacaccatttttgtctttgtgagcataatccaatgcctgaatacaacgtccggaaggcgtgtaataacgggagattgtcactttcaactgagttccgtaagttaaatcaacagagcgctgtaccaaaccttttccgaaactgcggcttcccagaatcacggcacggtctaaatcctgtaaagctccagaaacaatttctgaggctgaagcacttctgccattgactaaaatggccaaaggaatcgaagtatcaacaggttctttagttgttttataaatgttgttgtgcttttcgattcttgattttgtcgttacaataacctcattcttcggaacaaataaattacaaatatcaatagcttcattgagcaaaccacccggattccctcttaaatcaagtacgatttgtgtagcgccgtccgctttcagtttttccaatgcatctttcacctcattggatgcctttctgctaaagtgcgccagaacaatatagcctgttttagcatcgatctttccaaaaaacggaaccgacttaatatccacttcgtccaaaaccagttgagtggtgaaggtttgtccttgtctgaggtatttgatgttgattttcgtgtttttagttcccttcattaattgcgaagcgtcatctttaaagtcggcgatcaaaacatcaccgatctgaatgatctcatctccggctttcagtccggccttgtcggcaggatagtttttataaggttcacgaacaatcaaacggtctttttttcttgagatcaaagctccaattccggtatattctcccgtattgttgattttaaaattcacaacatcctgttcgttaaaataaaccgtataaggatccagactgctcagcatgcttttaatggctttgtccatcaggtcacccgggttggtctcgtcaacataatttgtgtttaccgctttaaacagagtcgtgaaaatttcgatttgtttggcaatttcgaaaaagtcgtctttgaaactggttccgataaataaaaaccctgcagcaacagcaggtatgatgaatttcttcttgaaataaggatacatgattatattttttttcttttaaatctttttctaataaagtagacaagtacgcaaaatacgattataaacggccatatactaatgatcgaaattaaaaaatcggacaggctgaaaaatccggattgaatagcagtccatattttggaaccataagaaatcttaacgccttgtttttgagctatggttttgtaaaatgatatcgttacagtactttctgaaacgcggctttcgagatatttcaattgcccttctttggcttcaatttcttcacgaatagccgaaatctgtttttcaatttccagaatttcactaatcttagtggctttttgtaaaatctccaaatagcgggcttcaagtttgcgttttgtgtttaatcttgaagttaagtcaatgtattgttcggtaacattttctgcagaaatctctttttgttcaaagtacgaaacacccttagaaaccgcatttataaaagaatcaaagtttgcactgggaacgcgaatcgttaaggttctgtaaatgttgtcatattctttgccttcagaatcattttgaatggaggctttattggcaacaatcgcagtttggatttgtttgaaagtatcttctaaatcattggtttcaaatcgaagagaagcctgtttgataattttttgtgtaatctccggagcagcagggtcatactgtgcatctgacgctggagcggattcattttttggagtaagcttgacagcgctaatcctcatattagcagaaggttcttcatttttactgcaactcgaaaagcctaaaaaaagcaagaataaaaagaaaatatagcgcataatatttcaaattaaatttaaaactacaatttttttataatttttcgtataatttgataaataaagttgtcgtaaacgaattacaattctgttttattttcagaatcagagcttttgtttacttgctgaaggaatttttcaaacagctgaatggtcttggtgttgatttcttcataaggcagtctgtctttcgtttgataaaaaaacatcaaggagtagggctgtggaatgttatccaaaagtaaatgtttgttgagtcggtacgtttctcttagaacgcgtttgaagtaatttcggtctacggcttttttgaagtattttttagaaaccgaaacgccaattttgattttttctggtgaattttcttccaccggagcataaaccaaacgcaaaggatattttgaaaccgatttcccttcagaaaacagtaaacttattgtggttttgctctttaagcgttcatttttagggtaagtgaagttcatttaattcagaaaaaatttgcaaattttagggcaaaggtacaatagctgtttttatatgaagtgatttaatacaaattctttgaaccaatttggaaaatcttcttcatttatatgaagttttaatgaattaccattgtttatttcagctattaaagtgagtttttcgccagaattatcaaataagaaggtcttgtttgaaatttcgattgcgggaaacaaattgtttaaagttcgtttgtatctgttttttataatttcactgtcaacggcgtgtccacctttttgaactctgttttcaacacgagagatatttacttccggatcgtctatacacacaaaatataagtatgaagtatagcccagagcatttgctatactaatatcttctagttttgaaatatggctcataaccgtttcaaagcaaaagcttttattttctttaagaagtttttctcttagaaaagaggaaataagtgagccttcataactattaggatctttagaaactgatactataaagttttcttttatctcaagagatatttgaaaacctttttcattggcagtatttattagcgtttttgtgttttcttttttgtagaaattttgtaattctttctgagaagattttagttcatacgaatctaaatctattaagcctttagttcgcaagatcttttcgaggtaatctgcatttataaaatagcccgtattgtaatgtttagaaaattcttcaaaaagagtgctttttccagatccgttcggtccggcaaatattctcagtcttttctttatttcctgcataaaatcattccttttttcaaacctttatcagtatctttcttttgttgaagatttcgaatgatcttaatttctccatttgggagcctttcaattatttttctgtctgatattgattttatagttagtcccaaagctttagattctctaatggcataacttgaacttctcgaagcagatcttattagaatatctgtttcattagcgctaagtttttctttatgttgctttattacaaagcgggcgatcttatttctcatgacttacttaaaaagaagtttattgtcaaatttacgatttttttatctgattctaaacaattaaacaacgtgtaagaactccatttaattcagaaaaaatttgcaaattttagggcaaaggtacaatagcaccagaaaaacggttattgttttcaatttttataccgctaaatatttatttattacttttgggcattaattttttaagcatgcaaaagataatttcgtaccccatttccgtaatttattacttgtgttttggtttttgtctggcggtatttcacccgatacaatggttctgcctgaatgtttttgggtaccaggcgcataaaaaaagcgtagattatctgaatttcttcctgttaagatgtaccaatctggtgggaacaaggtacactgttaccggagtagccgatataccaaagggagttccaatcatttttgttgcaaatcaccaaagtatgtacgatatcgtaacaatgatttggtactttagacgatttcattgtaaatttgtaagtaagaaagagttaggaagcggaattccgagtgtgtcttttaatttacgccacggaggatctgtcttaatcgaccgaaaagaccctaaacaagcgattccggtaatcaaaggcttgtctgaatatatcgaaaaaaataccagagctgctgtaatttttcctgaaggaacaagaagtaaaacaggaaagcccaaagaatttgcacaaagcggtttaaaaatcttatgtaaatatgcaccgtctgcttatgtagtgccggtaagtatcaataattcatggaaaatggttcgttttggaatgtttccggttggattaggaaatcatttaacctttacagcacataaagcaatggccgtaaaagattatgattttgccgatttaatggctttgacagaaaaagcggtggtagaaggagtaaatgagtataaatagatttttgttgtagtacaaacgaaaacttaaatcccaatcttaaataagtaatgtctataaaaaacattagattagaagtaatgcagtttttggaaaaaaacgtggatagcttcgttgaacagtatttaattccagtggaaaaaatttggcagccgtcagactttttgcctaattctgaaggagaaaatttctttgaggaggtaaaagagttacgtgaaattgctaaagaattgccttatgatttctgggtaactttagtgggggataccatcactgaagaagctttgccaacatatgagtcatggttaatggatgtagaaggagtcaatcagatagaaaacggtggaaatggctggtcgaaatggatcagacaatggaccggagaagaaaatcgccacggagaccttttaaataaatacttgtatttgtccggtcgtgtaaacatgcgtgaaatcgaaatgactactcagcatttaatcaacgacggttttgatattggaaccggatctgatccgtacaaaaactttgtgtacaccagcttccaggaattggctacttatgtgtcgcacaacagagtggcacaaatggcaaagaaatttggtgataacaaactgtctaaaatgtgtaaaatgattgcaggcgacgaaatgcgtcaccatcatgcttacagcgagtttgttacccgtatttttgctgttgatccaagtgaaatgatgttggcgtttcaatacatgatgaaacaaaaaatcgtgatgccggcgcactttttaagagaatcaggtcagaaaataagcagtgcttttgagcagttttcagattcagcacaacgtataggggtgtacaccgctaacgattatgttgatattatgcaaaagctaatcaacaaatgggaaattgataaaatttcaaatttgacagacgaagcagagaaagcgcgtgattacctgatgaaattaccagctcgtatggcaagaatttctgaaagacttgtaattcctgcagaatctcatatctttaaatgggttgagcctgccagattgtaaagtacagatttctgattttagagtttagatttgtaaaactttaagcagaatagctgaaaaacatattgttgattgttgaagtttcaaagctttgacaatcaacaatttttatttaaagtacaaaataccagagtaaatctttttcacctgcttgaggtgtatgacatttaccgcaaactataaatactatgaataactccgaacttataaataaaacgattgcttttgtaaaagagaaattaaacgatgccgaaggtgggcacgattggtttcatattgaacgtgtttataaaaatgcacttttaattgccaaaggaactgactgtgatcttgccatagtgcaattgggagctttgcttcatgatattgccgacagtaaattccacaatggagatgagaccattggccctaaaacagctcgtttatttctggaatcagagaaagttgcagaggaaataattcaacatgtggtaaacatcatcgaaaacatctcctataagggcggaaattttgaaaagaggttttcttctgtagaattagatatcgttcaggatgcggaccgtttagacgcaattggagccattggagtagcaagagcatttaactatggcggatttaaaaacagaacgctttatgatcctgcaattgcacccgtaaccaatatgacaaaagaggaatacaaaaagaatacggcaccaacgatcaatcatttttatgaaaagcttttgcttttgaaggataagatgaataccgaaaccggtaagcaaattgccgcagaaagacatcgttttatggaaacattcctggcacagttttatgcggaatgggagggggctaagtagagatttttttccgccgagacacactaagaaaacacaaagcttcacaaaggatttacaatctttgtgaagctttgtgtttatttggtgaagctttgcgaaataattcactcatgaacatccgcaattatgatccccacagtcttttttcttcttagatttccaaaagaactttttgatgaggtacccaacggcaatgaataatatgataaaagcgataatttcctgtaccatgatcgtttattttaaaagttgatacgctattaatgcaacaaaataggcaagaccactcatcaggacaagctgcatggcaggccatttccaggaattggtttccttcttggtgatggcgagcgtactggcacattgcatcgcaaaagcataaaagagcaataatgagataccggaggcaaaattaaatattttatgacccgtttccggattgatctcttcctgcattttacttcttatggtagattcgttatccgtgtctccaacactgtatatggttgcaagagttcccacgaacacttcacgcgcggcaaaggaactgattaacgcaattccgattttccagtcgtaacctaaaggcgaaataacaggctctatggctcttcccatcaaaccgatataggaattttccagtttttgagaagcgacttcattttcaaactgagtttcgtctaaagtagtatctgcaaatctctcttttacaatagtctcggcttcattaaaatcttttccgggaccatacgaagctaaaaaccataagatcacagatatggctaagataattttaccggcacccactacgaaagcttttgttttctccacaacattaatcgcaacgtttttgaacagcggcaatttataacttggcatttctaccacaaaataggtcttcgaactaatcttcagtattttgtccaggatataagaagcaagaattgcagttgcaaaacctagtaaatacaataacatcaaagctaatccctgcatgtttaagattccaaaaaggcgttcgtccggaattaccaatgaaataatgatcgtgtaaacaggcagtctggccgagcaggtagtaaaaggagttaccagaattgtaatcagtcgttctttccagttttcgatatttcgggtagccataatggccggaatagcacaggccgttcctgaaattaaaggcacgacactctttccggacaaaccaaattttcgcatgattttatccatcaaaaagaccacacggctcatataaccactttcttctaaaatcgaaatgaacagaaacagaaaggcaatttgtggaataaaaatgatcacaccgccaattcccggtacaattccctgagaaagtaagtcggtgagaattccgcttggcagttctgcggcaacccagctgcttaaggaagcaaaagagctgtctatgaaatccataggaatagttgaccaactgaaaatagactggaagatcagaaataaaatagccaggaaaatgacataaccccaaactttatgggttaaaacacgatccagtttcgctctgatatccttcgccattgaggcatctacttttaaaccttcttttaaaacatcgtttataaactgatatcgcttgatcgtttctttttgctgtaagcgttttagttccgaatgcgacttggtaaaagtacttctgatttcattacgatccaggttcgaaaaattcacatcctgcgtaattaccagccaaagtttgtacaacaactgattcggaaaagcttcctgtagtttttcaaaatacgcctgatcaataactgatgcgttcaggcaaggctcgtgcggaatatttttatacgaaacaattagttctttcagttcttcaattcccaaaccttttcgggaacttaccaaagcaatttttgtttttagtttttcctccagatacggaatatccaaagtaatacccttgctttccatgcggtctgacatgttaatgaccagaattgtcggaatttcaagatctttaatttgagtgtaaatcagtaaattacgtttcagattttcgacatctgtaaccactaccgctacatccggatataatttgtcgtttttgttcaataacaattcgataaccacactttcgtccatagaactggcattcagactataggttcccggcaaatccagaatgttggctttgatattgtgtggtaacttacagaaaccgatttttttctcaacggtaattccgggataattcccaacctgttgatttaatccggttagctgattgaaaacagaagtttttccggtattcggattcccaataagggcgacgttgatattttgaatgctcattacaaattggttttgataagttcaacttcaatttcacgagcagtttcaacgcgaatggctacatgtgagccattaatgtctaaatacagggggtcgccaaaaggcgcaatttgcagtaattcaactaagttgcccggcaaacaacccatttctagtagttttagaggaataagatcgatatcaaaatctttgataatggctttttcgccttttttcagagtgtggatagtattttgcaagcttatttagattgaatttagattgcaaaaataggcaattattctttatttcaaggtatttaacacttgcggaaatgctaaatctttctaaaaataagggattttagactgaatttaatgaatttcgcgattgttcttttgagggactactcctggcacagaaaattaatgtcttctaaaagacgtttaatttcttctttatttgttccgtcataaaaaccacgaacacgtcttttttgatccaccaaaacaaaattctcggtatgcaccatatcgtaaagctgatcaggacgtccgagttttacagctagatatgattttcgtgccatcgtataaatttcttttttatcgcccgtaaccagattccatttactgtcgaccacagcatgttttatagcataggctttcagtacgggaatactgtcaacctcaggaaatactgtatgagaaagcagcatcactttcggattgcttaaaactgctttttgaacatcctccagattggtcgtcatttttgggcagattgaaccgcaggtggtgaaaaaaaagtcggccacatatatttttccttcgtaattcttctgggtaatagtatctccgttttgattcacaaacgaaaaatcggcaattgtatggtatttgcttttatattgaaccgtgctgtctaccagttccggatttacatcggcaggattgtaaataggtaacgttttttgcggttttaaagccgagtaaaataaagatattgtaacggttgaaaatacaataagaacaataaagaatttacggtatttgtatagaaaagatttcataaaagcaatttgggtgcaaaaatacgaaaagcacttctcaaaatcctaagagcgcttagtttttaacaggttatagggagtaaaaaagggctgaaagcccaaaagcacgagcatggcgcaacgcgctatgtatgaataataataatacccaatgccctgtaagggctaaagcagattgacaccaataaacaaattttttattttttggttttccgaatagtcttatttaccaaatacagtcccgttaaggttacgatggtaccaatcgcgatcgcctgcgtaagggtttctccaaagatgaacgagcctaaaatcatcgcaacaattggattgatgtacacataaatactgctgatctctgttggaagatgctgcagcgaatagataaaagcgatgaaagttaaaaccgacccaataagaaccagataggcaatagaccacaaagaaggcagtggaatttcgcttaggggaatattaactcctgcagcttccgtaactccaaaaagaaaaacactggaaatcagcatttgcaaccctaaactgaaataggggttaaaactggatgcttgtttctttgtttcgagtattccgaaagcccaggttatggtagaagccgtcatcagtataattccaaattgaaaatcaggtcggagaaaatcagagatatagtccataaaaataatacagacccctccaaaactgatcaggatgcctatcaaagccattttggcaattttttgaccgttaaagaagttgatgataataatccagatcggaaataaagcactaatgatcgctccaagtccactgctcatgtattttacaccccaggtgcttaaaccgttgctgcatacaaaattcaaaaaggacaaaattaggatcgtacgccactgtctgccttttggccagggctgttttttcagaagaaaatatccgacatataaaattccgcctaaaaactgacgaatggtggccagctgtaaagcaggcatgtgttttacgccttctttagaggccagccaggtggttccccaaaaaaaacttacccagcataaagccaaaatcggtaatccgatagcttcaatttttcctgaaacggcattttgaatttttgctttcacttttatttcaattcggtgtaacaaatattcgaaaaagtattctaatatagagttaaaaaccgatgataaaaacatgaaaatatttgagaagatctattttgatgttataatattggagtttttacaattattttaaaaaatttaacattacgttccggatattaggaatacgtttgtacaaccaccaaaacttaaatataaatgaaaagacaatttagcagacctttgttctgcgcccttttttcagcagtttcatttacagcagtcaatgctcagaatgcaacttccaaagaaccaggtattaatgtttcgtacatgaatcctaaaatcagtgccggtcaggactttttccaatatgtaaacggaacctggcttgacaaaactcaaattcctaatgatcgtaccacatggggaagtttcaatgagttgatcaaaaaaacagataaagacgcgatgtctattctgaaagaggcttctaaaaatccaaagtacaaatcagatactgaccagggtaaagccgtaaacttgttttcaacaattttagatacagttgggagaaacaaagcgggcataaaaccgctgcagccttactttaaaaaaattgatgcgattaaaaatgttgctgatcttcaaaaatacctgactgaaatcggacaggaagggaatagcgtattttttggaatttatattggagccgatgagaaaaatagttctaaaaactccgtaatgctttatccaaacagattaggattgccggatcaggattattatatctctgaggataaagattctaaagagaagcgttcaaaatatgtacttcatttggcgagagtgatgcagtttactggcgaatcgccggaaaaagcaaagcaaagtgctgccggaattttagccttagaaacacaattgtcaaaaccaagactgaatcgtgtagaaagcagagacagtcgtttgcaatacaatccaatgaccgttgctgaacttcaaaaattaacgcctgctattaattgggatgcttatctctcaagtcttggtttggcaaaattgcagagtatagtagtgacggagcctaaatacatgaaagctttacaaactgtttttacagagaataaagtagcactttggaaagaatacctgaaatgggatttgcttaactcttattcaagtgagttgtcaacagatttggagacggctaattttgatttttacagcaagaccttaagaggtgcgatcaaacaattgccacgtgaagaaaaagcattgcaggtggtaaattcaagtgttggtgaagcattgggtaagttatatgtagagaaagtgtttcctgctgaagcaaaagcaaaagcggtagacatgattcataacgtaattcaggcatacaaaacccgtattaataatttgacctggatgtctgcggctacaaagataaaagcgattgaaaaactggataaacttactgtaaaagtagggtatccggataaatggaaagactactcggcccttgaaattaaaggtgtagctgagggaggaagttatttcgagaatatggtaaatctgtctaagtggaatttcaaaaaaggaatcgacaaattatacaaaccagttgataaaaccgagtggggaatgtcgccacagactgtaaatgcttatttcaatccatcgtacaacgagattgtattcccggcagcaattttacagcctccgttctacaattatcaggcagatgaagcggtgaactacggaggtatcggagcggttattggtcatgaaatctctcatggttttgatgattcaggcgcacgttacaatgccgaaggaaacctggtagactggtggacaccggaagatttaaaacaatttacggcacttggtactgctttggcagatcaatacagtgctttagagcctttaccgggtattcacgttgatggtaaatttacgttaggcgaaaatatcggtgatttaggtggtattaatgctgcttacgatggtttgcagttgtatttaaaagcgcatgggaatccgggattgattgacggatttactccggagcaacgtttctttatctcatgggcaacggtgtggagaaccaaaacgagagacgaagcccttaaaaatcaggtaaaaacagatccgcattcacctggaatgtacagagctgttgttccggttcagaacgtagatgccttttacgatgctttcggaattaaaaagggagacaaaatgtatgttgatcctgataaaagagtaaaaatctggtaataaataaaaccatagaaaacgacgctaatttagcgtcgtttttgatttctgtaaagatctttatctgtttttttctcatgcagatttaggagatctttaattttaaggatgtactataaaaataaaggagtgtaaaccatctaactaatcatgggtatagaagcaggccatagtctgaaggcattccgggagtcaattttatgtgaaaaatttaacatgacgtttggaataattagaatatgtttgtgtatatactaaaaactacaaataaaaatgatcaaacaactacgaaaaccaatgttttgtgttgtttctgcaatggttaccattaccgcagtaaacgcacaaagtgcaaaaccaaaagagcccggtatcaatctgtctaatatgaataccaaagtaagtccgaaagaagatttctttaagtatgtaaacgggacctggttagacaaaactgaaattcctggtgatagaaattcctggggaagtttcaatgaactacgtcagaaaacggacaatgatgcacttgctatcttaaaagaagcatcaaaagatcctaagtacaaatccaatacagatcagggtaaagcgattgctttattcaatacgattttagatactgttggacgcaataaaagaggagttacaccgcttcagcctttcttaaaaaagatcgatgccattaaaaatgtaacagatcttcaaaacttctttatcgaaatgcagccacaaggcggtattggtttctttggtgtttttgttggtgctgatgctaaaaacagtaacaaaaacacggttaacttaagtccgggtggtttaggattatcggacaaagattattacaacgctgatgataaagattcaaaagaaaaacgtgagaagtatgaagtacacgttgccagaatgttacagtttattggtgaatctcctgcaaaagcaaaagaaagtgccaagcaaattctggctttagaaatcgaattgtctgctccaagattagatcgtgtagagcgcagagaccgtagaaaacagtacaatccaacagcaattgctgatttaaaaaagaacacgccttctatccaatgggaaaaatattttaccggaattggaatggcaaaattggatagtgtaaatgtggcgcaaccgcgttatatgatcgctttggaaaagacattttcggaaaagaaagtagaggcctggaaagaatacttaaaatggtctttattaaacagaaccgcttcaactttgagtacagatatcgaaaatgctaattttgatttctacggaaaaacgttgacaggtgctttaaaacaacgtcctcgtgaagaaatggcgttacaggtaattaatactgctaccggtgaagccttaggaaaattgtatgtagagaaattattccctgctgaagcaaaagacaaagcaaagaaaatgattgctaatgtaatgttagcttacgaaaacagaattaatgcattgccttggatgtcacaacaaaccaaagtaaaagccattgagaaattgaagaaactaaccattaaaatcggatatcctgataaatggaaagactattcagcattagagcttaaaaatgtaggggaaggcggaacctattttgacaatatgagaagcatctcaaaatgggcttatgctgagaacctggctaaattaggaaaaccggttgataaaacagaatggggaatgtctccacaaacggtaaatgcttacttcaacccatcttacaacgagattgttttcccggcagcgatccttcaaccgcctttttacaattatcaagcggacgaagctgtgaactacggtggaattggagcagtaatcggacacgagatttctcacggatttgatgattcaggagcacgttacaatgctgacggtaatcttgtagactggtggactccggaagatttaaaacaatttacagctcttggagcagcccttgcagcacagtacagcgctttagagcctctgcctggaattcacgtagatggtaaatttactttaggtgaaaacatcggagacttaggtggaattaatgcagcttacgatggattgcaattgtatttgaaagccaatggaaatccgggattaattgacggatttacgccagagcagcgtttctttatttcttgggctacggtatggagaacgaaatctagagatgaggctataaaaagccaggttaaaacagatccgcattcacctggaatgtacagagctgtagtgccaattcaaaatgttgatgctttttacaaggctttcgatattaaaaaaggagacaaaatgtatattgatcctgataaaagagttaaaatctggtaacagaagatccataaaaaacggcgctaattttagcgccgtttttgtttttgtatttatgagatcgcaataaatatatctactgccgcatcttcaggattttgagcctgttccccgtaaatttcaaaatcttcggtataaagtctgtctaaatccgagttccaaattttcatccattcgttaatcacaataccatcggccagattgcctttggctgtaaacttttggtaatgaactccggagattgttttggcaaccattccttccgggataatagttagattttctactacacagcccaatatagtggtataaggacgtgtataatccttctcatagtccgtatagatacaatagatcgcattactagttttattgggaattttttgaagaattccttctgacataaatcgattccaaagtgccggaatatctgttcccgattggccattttcgttagtcgttcgtattgaaataccaatcacattgaatttttgttccatcttagctgttttttgttaagctgtaaaggtaaaatgttgcaatgacaacagtatgtcagcaggaaacgataattttactttaaatggctgtaaatataggtttcaattgcttttagctcttcatccgacattgcctgtgttaccggaaaattagtcttcataacagcaaactgactcgggtcaacaatagggtcggcatttcctttcaggaaagtaacaatgtctccgtttttgtctttgtatattttggctatttcctgaatacttgggccaattacttttttgtctggctggtggcaggagaaacaatttccctgtccttcaaaaatttgttttccaaattcttccggagttttggcttttgctgtttctccttctgaataggcttccgttgtagtttcaactggcgtttctgcagtttcttttttacaggatgcaaacgctaaaacggctgataagaatagtatttttttcatattatttatttagtaagactgctgcttcttttgcaaaataggttgtgataatattggcacctgcgcgcttaatgcaataaagttgctctaacataattttgtcgtgatcaagccaccctctttctgctgcggcctttaccatagcgtactcaccagatacttggtaaacagcaaccggtacctgaacggcattttttacctcacgaacaatgtctaaataagcaattcccggttttaccataacgatatctgcaccctcttcaacatctaataaagcttcacgaattccttcaattcggttggcataatccatttggtacgtcttcttatcttttgggatattttgagaatctacaggagcagaatctaatgcgtcacgaaatggtccgtaaaatgccgaagcatatttggcactgtagctcatgattcccacattgtggtgtccgttttcttccaatgcttttctaatagctaaaacccttccgtccatcatatcacttggtgcaacaaaatcggctccggcttcggcgtggcttaaactcattcgggttaacgcatcaaccgtaggatcattcagaagctgtccgttttctataattccgtcatgaccataaattgagtaaggatcgagagccacgtccggcattacaatcatttcaggaacagcatcttttatcgcgcggatggtttgttgcatcaaaccgtctttgttccaggcttcgacacctttgttgtcttttaaatgatcgctgatttttacgtagatgttcaccgctttaatgcctaaatcccaggcttcttttacttctttaatggtgttgtcgagagaatgacggtaaattcccggcatagacggtatggctacttttacatcttttccttcagtaacaaacatcggaagcataaaatcctgtggacttaaactggtttcacgaactaaagaacgaatggattcattggttcttaaacggcggtttctttgtaatgggaacataaaaatttagattttagattttagattttagattgcaacccatttcttcgaaatatgatggagaatcctactttctaaagtgtattgttttttgtttttttgaagattgtgttactttttaataagtggcacaaagttaaagaaaaaggaacagaattaggcatttagcctccggtggaatccgttaatattatctaaaaatttgtggaatatggcagttacatcttcgttcgttaagttttaaaagcaattggtgatctaaatttagaattaactttcagactctggtttttttgaatatttacctataaatttgtctaatgaagaaatttctcgcattatgctgttgtttactgctaaccagctgttttgaaataacagaaagaatcaaacatcacgaggatcaaagtggagaatacacactcatggttgacttttcgaaatcatggtttaagacaaaatcggccatgtggatggaagaggttgatggtgtaaaaatcccaaacgaacaggaaatcaccaaaaaactggaagattttaaagtcaaagccttaaaaattgacggtattaccaatgtaaccactaaaactgattttaatcagtatgtttttattatcaaactcaattatgccaatttgaaagcactcaatgctgttgttaatacgataaacaatcagagcaatcaagttcattttagcagcaataccaaaagttttgaaaggatcgcctcttatccggttcctgaaaaagtagtaaaagatccaaagaaaaaggaagatctggaagcggcaagtattacagcgatttatacttttgataaagatgttaaggccgtagagaatccgaacagcagaatttcaccaaacaaaaagaccgttttcttaaaacaaagtatgtacagcgtacttaaaaaatcggccctaatgaacaatacaatccaattaaccccttgatttatgaagcaattttacattttatttttaatattggccacccatttgacttttggacagatcaattcaaaatcctacgattattttgtgcagtttaacggagatcagctttcgaaaaaagtaagcgttgatcaaatattaaatcatccgttaattagcaaatacaaagaaggtaaagccagtctcgatcttaagaaatataccgctctttttaagttggatcaaaagataaccgttcatggtaacttcacagacagtattccgtattatcaggtgacacttccgattaaaaacaaagaagcagtgaagcagtttttaattgaagagcatacaaagaataaaaacacggattcagttgaggttcccgtaattcaggattatggcaaatacgctgtttttacaccaaaatatcaaaagacttcatttgtctggaacgataattatctggtgttgattgaattgactaaaaaatacaagccaaaatcatacgattgggaagacagaacgcaggattctattgcgatagatgaaccttatcaggaaacttcaacggaaacaacagcagaacctgcgcaatcggctgaagaggctgcggcgagtgctgcaaaagaaacagaagaagctgtagcggtgtctaatgccgaatacgagaaagcagaggccgattttaatcttttgcagaaagaacagcaaagtctttttatcaagtcattgttcgaaaatggattcatggctccggtttcagagaaggtaaacgccgcggcagatatttcgtcctggctgaattacagttcggcgatgaccagtttaaattcggcttatggtcttttatcgaaattcaccagttacaataagtttttacccatgcagaataatgcggcaaatatggtaaaaggaattaatctggatttttattttgagaatgacaacgcccgtattgaagaagtgattgaatatgctgaaccaatggcggctatcgtgggaaaaatgacggacagaaaaatcaacaaaaacatttttaattattttccggatgaaaaacctttaggatatatgtcttatcatatcaatacgaaggcggcactggaaaaatttccaacgttagtggcagatttatttcaaagtcagtatttagtaaaagaagacttgacgattattacggatttaatttcgacgatcgtggacgaagaagctacagcgacgctttttgatggtgatttaagtatgtttttgtatcatgtaaatgaagttgaggtaactaagaaaatatatgggtatgatgaaaattatgaagagaagatcacagaggaaaaagtgaagaagaacattccgttattctctatggtatttacttcaacccatcctacttttggtgataagttaatccaattaggactgcgcaaaaaattcctggaacaaaagggagatttttatgaaatttttggaacggaagactatggaactatttttattaaaaaagacaaagatgtggttatgatagccaatactttagattattttaatgacggaaaaggagtttttgttaaggaagcaaaaaaggaattaaagaaaaattacatctccggaaagttaaattttgcaagggcatcatttgcttatgagaattctggtaaagcaaaaggaaaagattcagaaaaattgaaacgattgtcagagcagtttagtgatattgccgtgcagtctcctaaaaaactgatcgataacaaattgaaatttgagttgaaattaaacgctttaaaatcagataaaaatatcatcttgcaaacgttggacttggcagaagaattgagtaaataatctaaagctcactataaaatcaaaatccccgaaagagatcaaatctttttcggggattttttattctgattttagaggattgatgcctcataaattcccttaatggatttttcaagttttgtattaaattcatcgtcagactggccaaatgttaatccctcagaaagtgctcgcgagaagctggcaatcaatccgtgatttagagccagtttttggttggcctcttcctgcccataacctccggacaatgccactacacgtacgacatgcggatcagacattaattcttggtaaaaatcatttacggttggaatcgaaagtttcagcattacttttacttctttgtccagtaaattaagctgcttgatgatttctgcttttagaatttcttctgatttttctttgtcgatgctataaatatcaacctccggttcaataattggaacaaggcctttgttaaatatttgaagtcctactgcaaattgttgttcaacgacttcgcgaattcccgtagcattggcttctttgattacagaacgcatcttggttccgaaaacattgcgttctacagcgcgagttaacaattcgttcagattagaaatgggtttcatgagttgtaccccgtttgcgagctcagcaagacctttgtctacttttagaaaaggaacgatatttttatgctcccacaaataatccgcagtccattgcccgttgattttgcggtccatcgtattttcgaacaaaatagctcccagaatatattcgctgctaaaggcaggacttttaataattcgggttctcatttcatgtacgagggtgtacatttcttcttcgtttgtataactgctttcctgtacaccgtattgtgctaatgcttttggtgtacttccgccactttgatctaatgcagcaataaatccttttccggtctgcatgcggttcaattgtgtggtattcaatgcctctctctttttcataataatgattttaagataaattacttatgttgaatccgtttgttgtaactcattcgaacacatagaaatatagattttgcatcgataaaaaagaaatacacttcatttaaatacacatatccgtctatttgaaagaaatagatttctttttttgttctcttttttaaacctataaaatctatgtttctatgtgttaaatcaatttttcgtattatgccgatgcagtttatgttgagtgtttttgctgccgttttttccggacaatttcagaacgtattaaagtccggttttctgatttattttttcgtaaacctcttttacttttttcggaggatcaaaacgatagccaatacttagctttaaagttgaaatattgtcattcaatagggcatccgtattgttgttctgaatgaaattaaccgtgtttaaattcacaaaaccgaaaaaacgatccctattgtaggcaagctttaaattaaagtctaattcaagcaaagcagaggttactttatcaatattgttaattcctgcaccaactgcgattcctgcaccaattaaaacgtgatcacttatcacaaaattataaaagtaggagggggctaacgaaaaaacataaatttcgccatctgaagagtctggcgtattgttcagattgatattggtataataaaaggagaaagtcggaatgaaacttccggagcttttggtctgccattcgttttggttgactaatgttttatacgagaaattatcattaaagatgtaagatgtcgctcctccaattttggtggtgcgcatatgcggataggcgatctgaaagttttcatcaccgacataaaatcctttttgattgataaaagtaaaagattgcatccactttttaaaataaaaacgggtgttgaaactgaacagcttggagcctgaattgtctttgtttacagtaaaaaatttcggtgcaaagccaaaactgatgtctataaatttgtaacttaaaccgatccccagttgttctcgtcgattgggacttaattcaaaatattttttttctccttcggaatcagaaccaatctgaaaattgtttgatgtgtctaaataataaacagtgctggtgactttatcgtcataagacttaaaataagggttgtgcgatgtatcattttgagcaaaacaccctaaaaagctagcgaggaatacgatataaatcagctttaagttcattggtttaaaattgcaattatctggaatttaacgaagaggaattactattttttaatatgtcaccccttcggggtttaaaaactaaatctacaaaaaaatatataaatatgtcgtcccgttgggactctgatatgtattggtttagatttttttgaggtattgtgttagttttagaattccattattttttacagagctccgaaggagcagcatatctatagaatatgagcattagattttttaagctccggaggagcgatatatttattgcggtatgtttgtaatgatatattattcgttgacatcgtcaaacaaatattcgtttttaaaatcaacgttaaacgatttcaaaaaaccgatatattcctctttgaatgtttttgttttgtgatgttcttcttgattttcaatgtatcgtataacatttgtcaaatgggaatgactgtacgaaaaggctccaaagccggtttgccattcaaattttccatttacccacttgctgtcatttatgaattttgaagaatttgctttaatatctcttactaaatccgatatcgacttatctggttttaatccaatcaagatatgaatatgatccggcattccgttaatagcaattagtttttgacctttattgctaataataccggtcatgtatttatagagttcgtctttccaatttttggaaatcagattttgccggcctttaacggtgaaaacaatatgaatgtataattgagaataggtgcttgccatactaacagatttttatagatatcgtccttatgggtttaaagactaaatctacaaaaatctattgacgggatattattttttgaaagaatttttttataaaaaaaaacaaatagagtctagtgtaattcaacccagtcaacagggttttccaatacctgaatcaatttttcctcaacacttccggcttctgcatgatgatcgtaaacccactgcacatgtggaggtaaactcattaaaatgctttcaattcttccgttggttttcaaaccaaacaaggtgcctttatcatgaactaaattgaattcgacataacgaccacggcggatttcctgccaatttctattttcggctgtgtattccagattttttcttctttctacaatcggaacataagcttccaggaaactgttccccacttcggttacaaaactgtaccagtcttccattgacatggtttcggttgctttgcaataatcaaaaaacaaaccgccaatacctcgtgcttcgtttcggtgagcattccaaaaataggcatcacattgtttcttatacttaggatagaactccggattatgtttgtcacaagccgttttacaggtctgatgaaagtgaacagcatcttcttcaaataaatagtaaggagttagatcctgtccgccgccaaaccactgctgaattacttttcttggacctgtactggacgaagacgaagtatcatacatttcaaagtaacgccagttcgcatgaactgttggagccattgggtttttaggatgaagaaccagacttaacccgcaggcaaaaaaatcggcttcgtctacattaaacattttctgcatggcctccggcagttttccgtgaacggccgaaatattgacaccgcccttttcgaaaacggctccgttctcgattacacgtgttcttccaccgccaccttcgggacgtttccaaagatcttcgcggaattttgcagttccgtcaaccgcttctaatccggcacaaatctgatcttgtaattgttgtatgtaagcgtaaaatttatctttcatgggtattgtattctgatttgagtaatccaaagtaaacaacatcctccagtgttccgtcgctgtttttgaattcgtctcttaatattccttcttgtttaaaatgatgttttaaagcgatctgctgacttgccttgttgatttttgaggtacagatgaatactttattcatgtttaaagtattgaagcaaaaatctaaggtttcggaaaccatttttgaagtaataccttttccctgataatcctcatcaataaaatagcccagttcacattttgaaatgcgattgtcaatgcttttgatgcacaaatagccaattaaagcattggttttgttgtctctcggatagaaaaagtatccttctttatgattttctttgtcttggttaaaagcaagaaactgctttgttttttcgagatccggacagtaagaaagtgtgacaggaaacgttttttgaatgtggtctctattcttttcgatgaggtggtaaaattcctcaggaagaatatgggcaatcgtatctgttttccaatctgtaaaaaccattaggatctgtttttggccgaagcaattttagtatttatcccgaaagagaaaaccttactttcttgttggatatattcataaatagccaaagctttatcgataagattataattttcagccttagaaagttcgattaaaatatccccgaattgttctaaatgttcccaatcaaaatgaagctgcattaataatgcgatcaaatcttcatttttttgacgggataaagtttcaaagtctagcctgatttctttcagctgattttcaatattttctttttccgtattattcaaaggataaggaacaaaaacaagtgatcgtaacgtcttgaggacgttatcaattcttattttttcttcgtctcttaaacctttgttcagcattttttagtttttggcctcagtcccagttttggtctcagttttcagtttgctggtaggcagctgaaaactgagactgcgtactgataactagtttccgtattctttaaccgcgtcaataaacgctttagcatgatctacagggatatttggtaaaatcccatgacctaaatttacgatatatttgtcttttccgaattcgtcgatcatttcgtgaaccatttttttgatggttggaattggagaaagtaatcttgaaggatcgaaattaccttgtaaagtaatatttccacctgataaataacgagcatttctaggagtacaagtccagtctacaccaagtgctgaagctttacttttacccatttcgcctaaggcaaaccagcatccttttccgaacacaataacaggagtaacttctgccaacgcatcgataatttggttgatgtatttccaggagaattcctgatagtcaaccggagaaagcattcctccccaggaatcaaaaatctgaacggcattaacccccgcttttactttttcttttaagtataaaatcgtcgtatctgtaattttttgtaataaagtgtgtgctgcaaccgggtttgaaaagcaaaatcctttagcagtatcaaaacttttagagccttttccttcaacagcataacaaaagatggtccagggtgaacccgcgaaaccaattaagggcacttcgtcgttcagcatttctttagtcagtttaatggcatcaaagacatatcctaaagtttcatttacatccggcacaaaaacctgatttacctgctccattgtacgaatcggatccggaataattggacctaaattgtctttcaattctacatgaatacccattgcacgtggaaccactagaatatccgagaataaaatagcagcatcaggagcaattctgcgaataggctgaacagtaatttcggcagccagttccggagtttcacatctggtgaaaaaatcatatttatcacgtaaagctctaaattcaggtaaatatctcccagcctgacgcatcatccaaacaggtggacgttgaacggtttctccttttagtgcttttaaaaataggtcgttttttaacattgtttttttgctttaggctttaagctttaggctttaagcgatgtttgttttttattttttgtgtttgcttgcagcctagagcttaaagcatacggcgattatttatattcttgtaaaacatcttcaatcacatcctcaacggtaggctgatctgcaataacgatatttttggtaattttttctagagcttccgcagtagtttcaccaatgcaaaagcagatttcttttttaatcgaattctctttcagataactttgtacacctgatggactgaaaaacagaatagcatcaataggagtctttattttctgaggggtcaaagaagtattataaacctgaatttcattgaattttagctccgcttcttttaaggctttgggtaaagtttctcggcgaagatttccgctgaaaaaagtataactttcactgcggtatattaaagtgataatttcggctaaatcggcagcataaccagtgtaagctactacattgaatccgttttctgataagaggatcttggtttttaagccaacgcaaaatacatttttacttttcagttcttccgatttgggatgggagagaacactatgaacggcattctgacttgtaaaaatcaaattatcgttgaggtcttttatttcgaaaggtttattttcggtttgaataaaatcggcttcaataacttcaagatgagcggctgttaaggcttgtctttgctctgttgaaagcttttttgtagatactatttgaattgatttactcattatttcttcaaagattctttaatggcttgcattaattctgttccgccgttgtttagaatttcctgagcagcaaagaatcccagttttttccactctcctatttcaacagtcttgttgatttccagtttttgttttccatcaaccgaaagtaaaacaccctgaaagtgaagtgtgtcctcctcttcattatagcgaaccaaagctccaattggcgccgtacagcctccttccagagttcttaaaaattgacgttcgatataggtgcaaatttcagtttcaatatcgtttaattgtgatagagcttcaagggcataattgtcgttttccatggccacaaccaccatggccccttgtgccggtgcgggaatcatccagtccagatcgatataattttccggttttaagttgatacgctccaaaccagctgcagcaaaaactgccccgtcccagttattgtcctgtaatttttgcatacgggtattaacatttccgcgtaaatcgacaacagtatgattggggtatttgttgaaccattgcgcctgacgacgtaaacttccggttgcgattgtacttggattggcaaaatcaggatttcctttatgaaccagaatatcaagaacattggctctttctaaaactgctgcctgaacaataccttttggtaaagctgtaggtacatccttcatcgagtgaacagcaatatttacatcaccattaatcatagcaacatctaaggttttggtgaagattccggtgatgccaagttcgtaaagcggtttgtcaaggataatatcacctgtagattttactgcaataatttcggttttataaccaagatcgtttagttttttctcgacagtgtgtgcttgccaaagtgccaattcgctatcgcgggttccaattctgattgttttttctgccatttttattttttaaccattaagatattaaggttcattaagctttgtgttgattttttaaggtaatgaagctgttaatctattagccttgtaaaatattcatttacaagtggtttcattgattttgttatatttaaagtgttgaaattaattaatagtccttgaggtctctgtaataatttcatataagttaataattgtgcttcgtgaataggtaatagattttctattgcttttagttcaacaactacacaatcattaacaagcaaatctattcttaaatcagattccaactcaagattataatattctattttaacacttagttgttgtttaacatcatatccgttttgctctaattcatatttgaggcattgctcataaatgctctctaaaagtcccgggcctaaggctttatgcacttttatagcaaaaccggtaatttcataagccaattgagtaacctccttttttgtcatagaactttttgtttgtaaaccattatgatattaagtcatagctagaattaaaaacgcgagatccttaatattctttaggttatttttttgcgtaaaaacttaattctcttaatgccttaatggtaaaaaccttaagaggcttttattttgaagaccttttcgatccattcgatgctttcatcaaccatggtatcgtcgtcttttaagtgattggcaaaatgagtagtgattttctgaatgattcggttactgataatctcagcctgttcctcattgaaatcagcaatttttctgctttgaaaatctaattccgagtttttaatcgcgtttagtttttctttcaaagcattaatggtaggagcaaatttacggcctttagtccaggttataaattcttctttaacttcctctataatggcttcggcagcagggatatgcagttttctgttttccagcgtttcatctgtcaactgtgataaataatccatgtgaatcaaggtcacaccttctaattcctcaacattttcattaacgtttttcggaatagataaatccagaatcaataaaggttttttaagattcaagatcgctttatcaaccgttgggttttgagccccggttgctaccacaactacatcggctttttgaagctcaagatgtaattcggagtaatccttaacgataagattcagttttccggctaatttctctgctttgtctttcgtacggttgattaaggtgatgtgctcgtttttagtatgttttactaaattctcgcaggtatttctccctatttttccggttccgaaaagcagaatgttcttgtttccgatatcttctacatttttaataatgtattgtaccgacgcaaaagaaaccgaagtagctcctgaactgatttctgtttcgttcttaatttttttactcgcctgaatcacggcgtttacgagtctttccaaaaaagcattggctagccccattgatttcgaatgggtaaaactggttttgatttgagagataatttcaaaatcacctaagatctgactgtctaagccggttcctacgcgaaacatatgattgatcgcttcctgatttttataaacgaatcctactttctgaaaagcatcaacagatccgttactattatcgcaaattaactttattaattgaaaaggatgttctgcaaaaccgtagatctcggttctgttgcaagtcgaagtgacaattaaactttctattccctcttttttagcctgttccaacaaatgtgttttggcaactgcatccagactaaattgacctctgacctcagcatcagcttttttataactcagaccaactgaataaaaataaaggtgtttcggtacgttattgttttccataaattcactttcataaaagtgcaacaaaattatcattatagtgtttagaaaaataacgctaaaagtactttttgtatcgctacatgtttttttgtttctaaacagctgtttttatgcaaaaagaagtatttttgtagcaaaatcaagttgttagaaaaggtttgtttagagtgattctaaataacattttgcatttacgctaatttttgtttcaaaaaaatatcgctatgagttctcaggaaattattaaaatcgaagatgactttacgctgatccgttttcaaaacgacagttcagagctctttttggggcagcacgaagtaggtagtggtctgatacagtttcatttcgggataaaaggcaatgctaaatttttgttcaatcagggaacttatgctctagaattgaaagaagaaaaatcgctccttttgtacaatccacaaaaagaattaccattgaatttagaactttctccaaattcctgggtgatttcggtaatcgtatcgatcaaaaaatttcacgcgttgttttctgccgaagcagattatattacttttttaagtcctgataataaggacaaaaaatattataacgaaggaaatattagtccctctatggctattgtgttgagtcagctgtttcattacaacctgcatccgtccataaaaaacctttattacaagggaaaaggatatgaattactgagtttgtattttaaccgaaccgaagatccaaatgcagaacaatgtccgtttttgattgatgaagataatgttttgaaaataagaagagccaaagaaattatcattgctaatatggctgagccaccaggtttgcaggaactggcggatgagattggcctgaatcttaagaaacttaaaatgggttttaaacaaatttatggcgatacggtttacggattcttgtttgattacaaaatggatttcgcccgaaaactactcgacagtggttcttataacgtaaatgaggtagggctaaaaattggttacagtacagggagtcattttattgcggcatttaaaaagaagtttgctacaactccgaaaaagtatttgatgtcgattaatgcaaatgtatagaattgaaaaatcatgaaaagtttaacatttttaatattaggtttgggattcttaggttgcgcaaatttaaaagattcttctcttaaagaaatattagaaaatgctcaacacgacattgaagtagattcagtcaaatattttaccgctggcttaccttttatcaaacctgttcttgcgaaagaagtaacagataaaatgtctgacgaatctcttaaatctatttatcgcagcgatataatattagacagtattcaaattaaacaaaaattgaggaaaaatatttataataaatatggtttatatgaaaggaatttgggatgtatgattgacaaacaaacttcaattttatcaaaagaatataaaaaaattaccagtcattatcttaaaaaaagaaatggaaaagattggaggataaaaatggaaaaagaactaaatagtacgagtgaaaattaaagaactatttttttacatcaattttttacatgagagaataaataaaaagtaataattatcatatttctaaaaaactgcaagcgctacttttgacgaaattttttaaaacaaacatattaaaagcttaaagcttagagcttaaagcctaaagcaaaaaaacataatgaaaggcgtattattagtaaacttaggatctccggaaagcccggaaccaaaagatgtaaaaccatacttagacgaatttttaatggataaatacgtgatcgatgttccgtatttgttaagagctttgttggttcgtggtattattttaagaaaaagaccggaagaatcagcacatgcttatgcgaaaatatggtgggatgaaggttctcctttggtcgtgctttctgaaagaatgcaaaaaaaggttcagcctttggtaaatgtaccggttgctttagcaatgcgttacggaagtatgaccatcgaaaaagggcttcaggaattacatgaaaaaggtgttacagaggtattgcttttccctttatacccacaatacgcaatggcttcgactttgactattttagttaaggcagaagaaattcgtaaaaagaaatttccacaaatgacttttactgatgttcctgcgttttacaataaaccggattatatcaagaatctggccgattctattcagaaacatttggttggttttgattacgatcatttattgttctcgtaccacggaatcccggaacgtcatattcgtaaaaccgatgtgacgaagtcacactgtaaaattgacggatcttgttgcaacaccccttcaccggcgcatgatttttgctaccgtcatcaatgttatgaaacaaccaggcaagtcgtaaagttattaggactttctgaagataagtatagcttaacttttcagtcacgtttggcgggagacaaatggctggagccttatacggatgttgaaattgataagatgccagcaaaaggaatcaaaaatttagccgttgtaacaccagctttcgtttcggattgtttagaaactttagaggaaatcgctatgcgtgccaaagaagattttgaagcaaacggaggcgaagagtttttggcaataccttgtttgaatgacgacgacgaatggtgccaaacggtaggtaactggattaacgattgggtttctaaataaatttatcggtggagaacttacctgttaattaccatgaaacacttcttctgctaaaagaaagaattaaattggctcagtataagagtctatctttagttaatacagagatgattttgatgtatttagactttggaaaagtgctctctgaaaggtcgaaattgggttggggtgaaagtattgtggataacttatctaaagacttacagattgaatattctggtgttaaaggattctcctcgcgaaatttaagaagaatgaagcttatttatgaggagatagaacgtaattcaatttggacacaagctgtggctaaaataccttggggacatacaaatattatattttctaaattgaaagactctgaaaggagaagtttttatctgcaaaaatgtctagaaagaggatggagcagagctgttttagaagaagaaatacgatttgacagttttgcaaaagcaaatgattttcaaagcaatttttctagtacgattgctgaaaataaattaattgactatcgattagaatttaaagatgagtataatctttcctttttaaatttggaggatattcatacagaaagagaattagagaatgcaattgtgaataacattacaaggacattaggacagtttggaaatgattttgcttttatgggaaaacaatttagactggaattggatgaaaaaggaatattttattgatattcttttttatcatcgaaaactaaagtcgatgattgcaattgaacttaaaacgtcggaatttaaaccagaacatagtcaacagttaaattggtatttacaattgttagataaaacaattaaatatccggaagacaatcaaagtattggcatactactttgtaaaactaaaagtaagctcactgtagagtatgctttagagatggcaaataaaccaattggtgtggcaacatataattatcgtcaattacctgaaaacatagcgaaatatctcccgacggagcaagaatttgaaaaattattacaatctaatactgatgataaataatggaatactataactatttaaaatcactgcatcttatttttgtgattacctggtttgcaggactattttacattgtgcgtttgtttgtatatcaaattgaagccagtgaaaaaccatctcccgagaaagaaattttgcaggcacagtacaaaataatggcctatcgtttgtggtacattattacatggccgtcagcagtattggcgagtatttttgctttttggatgctgctttttaccgatttaggaaatgcctggcttaaaatgccctggatgcatgtgaaattgtgttttgtttttttactttatctgtatcatctaaaatgccatcagatttttaaacaattacaaaacgatgaggtgaaatattccaacaacttcatgcgtttatggaatgaaggcgctaccatcatactatttgcagtagtttttttagtagttttaaaaagtgccatcaactggatttttggtgtgatcggaatcattttattttcagttttgattatgttgggatttagattttataaaagaataagagaaaaaaggtaattagtgaaaagtgattagtctttaagttttaaacttttactattcactaataactcttcactgataactaaatatgtttaacaacttcaaaatgtcaatgctttcgctgcgtgtcaggattttcctgtcaatgattgtattgattgttgtggcatcgtttttattagcttctatttccattattcagtttaaaaacgaggcaaaagaataccatcaggaacgtctcgagcgcaaagaaaatgccgtaaaagaacacatcaattatgtgctttccacaacaacatatcctttaaaaaccgccaacctggatttgatttttaaagataaaattcacgaactggctcagattcataaaatcgaaatcaatatttacagtcttgacggaaaattattgaagtcctcaaaggagtctttcgccgttgataaagttgctcctccaattcccgaatacatcctgaaattagtgcgctcttctatcgaaaaacgttttgtagatattaaaaccattgatggtgttaaaaatagatcgtcttacagtttgattaaagacgaaaagttcaaaccgctggggattctaaaccttccctatttagaagacgatgggtactacgataatgagctcaatacctttttgattcgcttaagtcaggtatattccttcatgctgattgtggcttttggattggcttattttttatcgacttatattacaaaatcgcttaaaacaatttccgataaactggaagaaaccaatttagatcagaaaaacgaaaagattgttttagaagccaacagtaaggaggttaatttcttaatcaaagcttataacggaatggtggataaattggaaaccagtgctataaaattagcccaaagtgaacgtgaagaggcatggcgcgaaatggcgaaacaggtagcccacgaaatcaaaaatccgcttacaccgatgcggttgactgtgcagagttttcaacgtaagtttgacccaactgcgccggacgttaagcaaaaactaaatgattattcagagaccttaatccagcaaattgataccatgacagcggtggcttcggcattctcgaactttgcttcgatgccggcacaacaaaatgaaaccttaaacgtggttgaggtcgtggagcttgctttagatattttcaatgaagattatatcgtttttgaaagtgaagaggaggaaattatctccaagatggatcgtacacaattgatacgggttatcaccaatcttgttaaaaatgcaacacaggcgatcccggaaagtcaatttcataaatcgattgtagttactgtaaaacgcatagacgacgatgtcgaaattgctgtaaaagacaacggtatcgggattcagaaacaggatatcagcagaatttttgagccaaaatttaccacaaaaacaagtggaatgggacttggactcggaattatcaaaaacatcatcgaaaattacaaaggaacaattacctttgaatcaacttacggaaagggaacgacatttagagtttctttaccgataaccaactcataaaattagcatcatgaactacgaaaatcttttaatctcaatcgaagaaaaaattgcgaccgtaaccatcaatagacctaccaaattaaatgcgttaaacaaagccacaattagtgacttaagcaaagcagtgaagttgttgagcaaaaatgatgatgttcgtgttatcattatcaccggaagcggggagaaggcatttgtagccggagctgatatttcggaatttgccaattataccatcatcgaaggagcgcaattagcggctgaaggacaggaaattttatttgatcttattgaaaatttgaaaaaacctgtaattgcggctgtaaatggttttgctcttggtggaggattggaattggcaatgtcttgtcatttcagagtagcctcagacaatgctaaaatgggcttgccggaagtaactttaggattgattcctggttatggaggaacgcagcgtttgccacaattagtagggaaaggccgtgcgatggaaatgattatgaccgctgctatgattggtgcagaagaggccaaacaatacggtttagtgaatcatgtagtgccacaagcagagcttttggattttactaccggaatcgctcagaaaattattaaaaatgcaccatttgcaatcgctaaagccataaaagcgatcaatgcgaactatgccgatggtaaaaatggttttgacaccgagatcaaatcattcggaaaatgtttcggaactcaggatttcaaagaaggaacaacggcatttttagaaaaacgtaaagctgaatttacagggaaataattttttttcataaccgctaagaccgcaagggtttacacaaggttcgcaaagtttttaattttccttgtgccctttgcgtaaatcttagcgaactttgcggtaaaaaacctcagcatctcagaaccttagaaccttaaaaaaatgtacgaaccaatatttgcccttttttgtgaacgggttaaagaaagcatccaggcgggaaccttcgcaaaattgactttggccaaaacaatgggcgataccgagattaagaatatttattttcgtttagttttaaatgaggataatactttctctatttctttaacaaccagatataaaaccgaagaagttgaaagcgttcataccttagacgaagcactattggtattaggaacttatattaaaaatccatttttaacagctttattgtttaccacagataatgatttgacgtttaaggtgaacaagaagaatgctggaagtattatcgaacagccaccaacgtttaaaaacgcttctccggttatgctggaaatgatcgagaaagggatagtttaaaggatactatttatcgttacggttattttgtagagaaatggtttgaagcaaaggcctggttccgatggaactatattgtttttttgcattttttgggtcaacggattaaaatccgttgctacaatatgttccgttcctttggaactttaattgtatggtgtgtttccagattatcgaattaaaatctattgcgacatcatttatcatttctctgaagttttctgaagatatgattaaaagagagccataggctcgttctttaattttgtagggacggattttaatccgtccaaacgataaattcccacagaattgagagccataggctcggcccatttatggagatctaaaaaaatctttatccatagcgaataataaacctctaaaccagctttacaaacaagtttgaggcaattttattcgaaatagacaattcccgtccatcaaccttaattttaacggacaaatcaaacgattctttcgataaaagatcaattttagagcccaaagcaattccttgtttgtccagatactttaaaaactctgaggaagtatcttttactcccacacaaactccggtttgatattctgttaattctgaaagcaattgtttctcgattttgacgattcgtccgttggcatcgggaattgggtctccgtgcggatcttctgtagggtttcccagaaaatcatccagacgattaatcagttgttccgatttgatgtgttccagctgttcggcaatatcatgaacttcatcccaggaaaagctgagtttttctactaaaaaaacctcccataagcgatgttttctaacaatcattttggcggctagtttcccgttttcagtcaatgaaactccttgatactttttgtaattcactaaatctttctccgacaattttttaagcatatcggtaactgatgaagctttggtttccatcatttcggcaatggcattggtgctcacttcagcatcgtttgaagccgtaaggtggtatatggatttaaggtagttttcttctgaaaaagtcatttttttgaggttctaaggttctaaggttctgagttgctaagttaaaggactctaaaaacctgaggaccttagcgactcagaaccttagccactttatttaacaattagcaaaggtatagaaattttgtgtctcaatttgtctaccgttgtgccaaacaaaatatcttttagtccggtgtggccatgggttcccattactaaaatgtcgaaattaccaagattgatgatttccggaatcacactgttgggttttccaaagcctagttccgtttcgattttgaaaccttttgaggacagcatctctttatattctgataatagtttttcgtcgatagtcgtttcatgatcgtcgacattgcctccatacatcaaagctccaacagtttcaacgatgtgaattaaggtgtattgcgcgtcgattccgcccagttcaaaggcattgtttagtgcagcttcatcggccttagaaaaatcgactgtaatcgctatatttttcttgccataactttctttgggcgtatagaccaattttaaatgatgcggggaatgattctcgatatttgattttattctagtgacaaaaggcttgaaaataatgtacagcaataaagtcagaaatccgaaggcaagcggaacgactgtcaaccagagtacggttgggttatcagagttttgcagccacgaagtgatttcgtcatacaccagctttgcattcagagttactataatcgaagcaataatccatgcggcgacctgtgtcgttcttgaaatatgaaaacctttcattttggttttatcgctcacgaaatgaatcagcggaataatcgcgaaaccaagctgtaagctcaggataacctgacttaaaatcaataatttccctgttacgctttctccataaattaaaatcaccacaacggcaggtacaatagcgattagtcgtgttataattcttcgaacccaaggctggatgcgtaaattcaaatatccttccattacaatctgacccgctaaagttccggtcacggttgagctttgccccgcagcaattaaagccaccgcaaataaaataggcgcccatttagttcccagtaaaggttcgagaaattgatgcgcattctgaatttcagccacttcaaacattccgtttttgtaaaaggtagcagctgcaaggatcagaatggccgcattcacaaaaaaggccaggtttaaggcgatggtcgaatctataaagttgtatttcaatgcctgtttgattccagccggagtcctgtcgaattttcgggtttgtacgagtgacgaatgtaaatacaaattgtgaggcatcaccgtggcaccaataattccgatggcaatgtacaaagctgcagaacttggaattgaaggaaccagaccataaataactttatccagttcaggttctgcaaaaatcatttcaaatataaaagagaatccaatgatcgccaccagtacaataataaaagcctccatttttcggattcctttgttaatcaggaatagtaataagaaagtatccaataccgtgattaaaactccttcgattaaagggatgtcgaaaagaagattaattccaattgccattcccagaacctctgcaaggtcacaggctgcaatagcaatttcggctaaaaaatataaaatgtaattgatagacctggagtaagtctcccgtgatgcctgagccaagtcacgttgggtcacaattccaagccttgcacttaagctttgaagcagcaacgccatcaaattactcattagtaaaacccaaagtaaagaatacccaaactgacttccgccggcaatatctgtcgcccagtttccggggtccatataaccgacacttaccaggtaggccggtcctaaaaaggctaatatttttctaaatcctgtttttttatgttgtgtagcaaccgattggtgtacttcttctaaagatttggtcattgtaaaaatgttgtttgaacaaatatagggataaattatatctgcacaacaatatttttagacaagtctaaaacttaattgtttgaattcaaacagttcggacacaatcctgacaaggtgaagtttatctcatttactttataattgtgcggaataatgtagctaggttttacattttccagacaagtgacctcgagacatttttcacagctaaaatgagcgtggttgtgaatgtgtactctttgagcatgatgatggcatttggcatactttacggtaccgtcaagattcacaattttatgaacgatatcttcatttactaaccggtctaatattctgtaaacggtcacacggtcacacaaatcatcaatctgtttgtgaatttcggtgtgggacaaggctgttttagatttgtcaaaaatctctaaaaccgctgtctttgctgctgtatttcttgttgttttcatttttaaagcattaaaaaaaattaacgcaacaatgttgcattaaaaataaagttctatatttgcaacataattgcattaagcaaatgtactgaaaatgaagaaaacaacgacgcctttttacgatatattaggaatctcaagtgctgccatttgtctggttcattgtctgatatttccgctacttactattttgcctttgggtattagtcataatccatttatcgatttgacctttgccttaataggtttaattgcaatcctcaaaattattaaaaaatcaagtcttttagtcgctacaactttgattttatcgatatctctgatttggatcagtattttgagtgaaatgatactggatattcatttggatctgatttttattggcgggatcggaatgattatcggacatcttctaaattataaaaaacacaaacacatttagtaatggaaaaactacccgtaaccgttttaagcggatttcttggcgcaggaaaaacaactcttctcaatcatattcttcacaacaaagaaaaccttaaagttgctgttatcgtaaatgatatgagtgaagttaatatagacgcgcagctcgtgaagaaggagcataccttgtccagaaccgaagaaaaactggttgaaatgacgaatggctgtatttgctgcaccttgcgggaagatttaatgcttgaagtcgaaaaactggccaaagaaagcaggtttgattatttgcttatcgaaagtacaggtatcagcgaacccattccggtagcccagactttctcttttgtgaacgaagaggaaaatattgacttgtccagattcagttacatcgataccatggtgaccgttgtagatagttttaacttttttaaagattttggttcggccaaaacactgcgggaggaaaacttatccgatcttgaaaatgacaatagaacgatcgtcaaccttctggtagatcaggtagaatttgctaatgttatcattttgaataaaacggatctcgttagtatcagatcattagaatttttgagagcttctattcaaaagctaaatcctgtggcgaaaataatcacttcggtttcaggcaaagtaaatccaaacgaaattatgaacaccggattattcaattatgaagaagccgaaaattcagcgggttggattcgggaattagaaggtattcatacacctgaaactgaagaatatggaattagttcttttgtatttcgagatcccagaccttttcatcccaatcggttgtggaatttttttacatccgattttcccgccaacatcattcgaagtaaaggactgctgtggatggcatcccgaccggaacaagcgataaactggagccaggccggtggatcaatgaaagccgaaggagccggagtctggtgggcaagtatgccgctaagcgaacgaatgacctttaataattttgttgaatttcaggatattatagaagaacggtggacttctaatttcggcgacagactcaatgaacttgtttttattggtcagaaaataaaagaaacagaaatcctgaaagagcttgaaaagtgcctttgtacaaatgatgaaattgtagattatcaggacggattttttccgaagaaagatctttttcccataccaagaacttcttaaaaatagaatatagtgagagataaaaataaatacgatgttataattattggcggaagttatagcgggctttcggcagcgatgagtctggggcgttctttgcgacaggttttggtgatagacagtggtttgccctgtaaccgacaaacgccttattcgcataattttatcacgcaggatggtgaaaaacctgccgttatttcggcgaaagctttaattcaggttgatttttacgataccgttcatttttataacggattagcgattcgggcaattcaaacaaaagaaggatttgaaatcaaaacagaatccggaaaagtgttcatttctaaaaagttattgttcgcaaccggaataaaagatttactaccccaaatggacggttttagcgaatgctggggaatttcgatattgcattgtccgtattgtcacggttatgaagtcaaaaaggaaaaaacagcgattatcgctaatggtgatatagggtttgaatatgctaaactcatttcgaactggacggaggatttaagagtcttaacgaacggaaaatcaacttttaccacagcgcaatctcaaattttactacaacataaaattaaggttatggaagatgaaattgctgccgtaaaacaggaaaatggaaatattcagcagcttattttcaaaagtcaagctacaattgaagtaaaagctatttatttcagagcgccttttgagcaacattgcccacttccggaagctttaggctgtgaattgacagaacaaggtttgttgaaagtagatgcgtttcaaaaaacaacaattcccggagtttttgccagtggtgattgtcatattcaggcgcgatctgttgctatggctgtttcttcaggatcttttgccggggcttcgattaataaagaactgattgatgagtcatttttaggttaaatcggataagctttccatgtgattaaaatagcagcaaaaccttgaattgaagttagatcaaagttttttgcgttaggaacactatttgtcaaatttaatttttagttttgtctaaatttaattttataataatgaaaaaactatttttgatgctgcttttcttttgtctgcagttttcatttgctcaggaaaccagttctgtttccggaattatttcaggtgatggccatgaattgcagttggcaaacgtacatttattgggaacaaaatacagatcggttacggatagtttaggatattataacttcgaaaatgtaccggttggaaattatacgcttcaggtttcactggtaggttttcggacttcaaaaaagaaaatcgacgttacgaagggcgctgttcaaacgtatgattttgaattggacgatacagacaatcaattgaatgaagtagtggtttcgggaactttaaaagcagttaaacgtttggaaagtgctgttccggttgaggtttattcccctgtgttttttaagaagaatccaacaccgagtatttacgatgcgcttcaaaacataaacggcgttcgtccacagttaaattgcggcgtttgtaatacgggagatattcatataaacgggctcgaaggtccatatactttggttctgattgatggaatgccaattgtgagcagtctttcaacggtttatggtttgtccggaattccgaattctctggtggaaagaatagagattgtaaaaggtccggcttcttccctttacggaagtgaggctgttgggggattaatcaatatcatcaccaagaatccaacaaatgctccggttttttcggcagattattttaccactacgtatttagaaaataatctcgatctgggaatgaaatttaatgccggaaaaaaggcgacgtcacttttaggagttaactatttcaattacgaccaggttatcgataaagacaacgataatttcaccgatgtgacgctttctaaaaggatttcggtttttaataaatggagttttcatcgaaacgacaaccgtctttttactatagcagcacgcggtatgtatgaagaccgttggggaggagatgttcgttgggaaagaaaataccgtggaggtgatgaaatttacggtgaaagtatttatacgaaaagggcagaattaattggaagttaccaattgccttttgaagaaaaactaatgttatcgttctcggggaatgtacattatcaggacagccgttacggaacaacatcgtatattgcgaatcaaaaaataggtttcctgcagttaacctgggataaaaagataggcagtaatgatttccttgccggaatagcaagccgatactcctactatgacgacaatacgccggcaacaaaaaatgccgaaaaaacctggttgccgggaatttttgttcaggacgagataacgttttctccaaagagtcaggttttgttaggggcgcgatacgattataattctattcatggttctatttttacaccccgatttgcgtatcgttttaaggcaaatgaaaatacgatttttaggttaaatgccggaacaggatttagagtggtgaatttgtttaccgaagatcatgcagcgcttacaggatcgcgagatgtggtgcttaaaagtgatttaaaaccggaaaaatcagtaaacgttaatttgaattatattcagaaaataaactttgacagcggggtttttgtcggaatcgaaacaacggctttttatacccgtttcagtaataaaatcatttcagactacgaaaccgatcccaataaaatcatttacgacaatatcgatggttatgctctcagtcagggaatcagtacgaatatcgatgtcaatttcaccaatggtttaaagtttattttaggagcaaccgttttagacaataaaaatgttcaggacaaaatttcacagagaccttttttaaccgaaagatttaccggaacctggagtgtctcgtataaaataaacccttggaatttagtgctggattacaccggaaatgtttacagtccgatgaaattgccattgttgaatgagtacgatccgagaaatccaaattcaccctggtacagcattcagaatattcagtttacgtttacaggctggaagaattttgaactttatgggggaatcaaaaatttgctgaactttactccaaaacagaataatccgtttttgatttcgagaacgaatgatccttttgataaaaatgtacagtacgattcggcgggaaaagtattggttacaccggataatccatacggtttaacttttgacaccacttatgtttacggacaaaaccagaccattcgagggtttttaggattgcgatacagttttaggtaaatttatgattcacagattcataaatgtttttttattcgccacgaattcacgaattgccactttttttagataaagatttacaatttaattcgtgaattcgtggcagaagagcaatcctttacaatctgttgaaaaaaaacaaaacaatgaaaaagctatttctacttattttcttcttcggtataacttcaacaggattttgccagctgaaaggcagaacttttgaggaagtagatagcttggcacaatttcaaaaacgaaaaattattgttttcattcacaccgattggtgccagtattgccagagaatgaaaaatacgacgtttaaaaatcaggaagtgagtgaaaaactcaattcagacttttacttcatcgatttgaatgccgaagcaaagagagcgattacctttaacaaacacatttttaaatacaagccttcaggaaataatgtgggtgtccatgaactggctttgcagcttggcaccataaacggacagcttgtgtatccggttttatgtgttttgaatgaggagtatgaaattattgctaagtataacagttacttgaagcctaccgattttaaactgcttttggaaaagcttcaaaaataaaattccttatttttgaggatgaattcttcgcaaatcaaacacttcgattacatttttaccggaacgggtttagcagctttgatgaccgtttacaaaatggtattgtcagggaattttgcagataaatcgatattattactggatcaggacgtaaaaaagaccaatgaccgaacctggtgtttttgggaaaaaggagattcggtctggagttcgattgttcttaaaaaatgggattcggctttgtttgccaatgaaaatttcaaacgtgatttaaacctcaaaccttatcaatacaatcaaattcggggattggatttttatgattttgtttttgaagagttgtccaaacattccaatatcacttttttaaatgagaaagtgactgatatcaacgaacttgaaacccatgtttttgtacgttcagaagagaataggtatacttgtaattatttactgaatagtatttataccccatcgactgcattaagtcaaacgaaatatcccgttctacaacagcattttgtgggttggtatgtgaaaaccgaaaaagaagtcttcaattcggaacaggctactttcatggatttttcggtggaacagaaagggaacactagatttatgtatgtactgccggtttctaaaaccgaagctttggttgaatatactttattttcggagaacttgctttcaacgacagagtatgaaaacgagattcagatctatttagaaaaacgaggtattgagcagtatgatattgtagagaaggagcagggaagcatcccgatgacttgttatccgttctggaagaagaatactaaaagagttctaaatattggaactgccggaggatggaccaaagccagtacaggttatacttttaaaagtgctgataaaaaatcagctggtttggtggagtttctctattcttcgacatcaattaggatgaccgcctttcataaaagaagccgattctggttttacgatttactgcttttggacattctgtatcgtcataatgaattgggaagcggtattttttcctcattattcaaaaaaggaaatccgtctttgatttttaaattcttagacgaagaaactactttgattgaggatgttaaagttattttaaagtgtcctaaagtgccatttataaaagcgttatttagagtgatttttctgccaaataaatttaacttaaaccaataacctttgaaaaacactattttaggattcagtttctttttttcgattatctcttttgcacaagtatccaaaaataaagctcaggatgctattcaggtcaaatacttagacagttgtgcctataagtacaattatacttttgaaatggcggaatggcagaattgcatcgacgaaggtctaaaaaaagatagcacaatagcttatctgtggcaacaaaaagcaatgccgtattttaaatgcaagaaatacgaagtcggaatgccttttctggataaagccgttcgttataataaacaagaatggcttccgtaccgggcttttataaaatgtatttttgcgaaaacgtataaaagtgcgattgttgattttgaagaatgcattaaactttacggaaacagttatgtcatggatcatacctatagtttttatttggggctttgttatttgcaattgaatgaatatgacaaagccgaaaagctgtttgacgattatgtaaatgacatttataaaaacagacaacaattagaacatcctacagcgtatttttatcagggaattgccaaatacgagctcaagaaatgggacgaagcacttgttatttttgataaagcgctcaaagtatatcctgaattttcggatgtgaaatattataaagcggtttgctggttaaagcagggtaaaccaagagaagaagtcgtcgctttggttggcattgcgagagatgatgctgctaaggggttttctcttaatgaagacaatacgatttatgagacttatccatatcagaagaaattcaccaaacaatagattgttttaggtgtttattttttatggctttacagctttcgactaaatcaattgaactataacaaaactttataccacaaattaagtagttgcgggtaaactttgtaactttgcaaatcaaaagtaaaatttaaaaataagaaatatgtatccacaagaaatggtaaaacctatggaagctgaattaacagctgctggttttcaagatttacatagtgcagaagcagtagataatgctatcaaagctgaaggtaccactttagttgttgtaaactctgtttgtggttgtgctgcaagaaatgcacgtccgggagcaaaaatgagtttagaaggcgctaaaaaaccagatcacttaattacagttttcgctggtgttgacaaagatgcagttgatgctgcaagacaacatatgttcccttttcctccatcatcgccatctatggctttgttcaaaaacggagaattagttcacatgttagagcgtcaccacatcgaaggtcgtccggctgaattaatcgctgagaatttgagagacgcttttaacgagttttgttaatttaagggactaagattctgagttgctgaggttctaaggttttagactcaaagtgacagaggtataaagagttataacaagaagcactattttcatagtgcttcttgttgttttataaggttttaaaaccttagtgccttagaatcttagtaactcagaacctttacggattccatcccccgccaagggctttgtacaattgtaccatcgaacttaattgtctttcagacaactgtgaaagacttaattgcgcctgaaacaagttgctttcgacatctaaaacttccagatacgaaacataaccgctgtcatatctttcgtaggacagtttatagtttattaaagccgcattaacctgtcggtttcgggcgttccattcttctttgtaggttttgatgttctgaatagattgttctacttcattaaccgcagaaatatacgttttttgataggtaaacttgagttcttcagcctgttgtctgtatatttctactctgcgtttgtttcttccaaaagcaaatataggaccggtaactcccgcagaagcattttgcgaataagaacttcctaaaaacaaattgcttaaatcggcgctggcgaatcctgcaattgctgcgaggttaaaagaaggaaagcgcatcgcctgggcggttccgattctttcattggaagctttgtattttaattctgccgctttcacatcaggtctgttttccagtaaagcggacggaattgataacggtatttcgcttacaattcgcaattcggtattggattttcctctgggaatttgtgatggaagctgaccggtaagaagggaaataatattttcctgaatcgttatctgtcttttaatgttaggaatagttgcttcggcgatcgcgacctgttgttcgatttgtgctttgtctacctcagagatataaccgcttttgaatctttggtttataatttcataatatttttcccgggtagaaagggtatgctgtgcgatctctaactgatcgtcgaaatttcgcaactgaaaataagctgtagcaatatcactcacaatatttgaaagtacaactttacgggcttcctcagtagccagaagttcattttgtaccgctttattttcatgacggtatcttccccaaaaatcaatttcccaggacatgtttgcactgacatttgacggcgtcagatttttttcgttgctgtttatggttgctccatattgaaaagagggtaatagatttgttttagagtatcctagttgggccctaagctgatcaattctggtaaccgcaatttttaaatcataattattctgaagcccctttgtaatcaggtcttttaaaacatcatcattaaataaatcaaaccattttaagttgacgaccgtggcgagactgtctaaatttcgttcgttttgataagaatcagactttagctgttccggctttttatacttaggccccaccatacagcctacaggcaataagaagagtaaaaggataatggctattattttatatttcttaatcatcatggccagtggtattagagtccttattattttccgtcgttgcgatagtatcttttttcttttttccgatgttttcaatcatgacaaacaagccaggtacaattaatacccccaaaacggtggcgattaacataccgctaaatactgccattcccattacaatacgtgcctgagagcccgcacccgtagccgttaagagcggaacaacaccaagaataaaagcaaaggccgtcattagaatcggtcggaaacgaagttttgcagcgaccatagccgattcgtacagcggttttcctttttcgtattcttctttggcaaattcgacaataaggatcgcatttttggcaaccaatccgattaagagcactaacccaatctgagcaaaaacattgttgacgtaggcatcacttccgattctggctaatagcagtcccaaaaaggcaccaaaaacggcaaagggcgcaccaagcaagacactgaaaggtaacttccaactttcgtactgtgcggccagaattagaaatacaaatacgagtgccatgataaatacagaacttccgccgggagaatgtttttcctgatacgaaaggttgatgtaatcgtaacccatatccgccggcagggtttgtttggcgacttcttctaaagcttctaaagcttgcgcactactgtaaccgtcattcggacttccgccgatttcggcagatcggaacagattgagacgattggtaaaatcagggcccataacctttgaagcggttaccaatgtggaaataggaagcatatcaccatcattatttctgatataaatcaggtttaaatcttcgggttttaccctattgacggcttcaccttgtatgaaaaccttgtattgacgtccaaaacgattaaagtcatttacataacttccccctaaaaaggcacctaaagcttcggtaactttcgagaccggaacaccaagtttcatggctttgtcgttatcaatatccaatttgatttgtggagaaccggcattaaaagtggtatagattcgttttatttccggacgctgctgagcggcggctataaaagcctgagtctgttcggctaaatattgtggagtattaccacctttgtcctgcagcattaaactaaaacctgcggaagcacccagaccctgaatggccggaggaccaaatccgaatacggaagcagtggtgatttgagtcgcaaattttttgtttaagcggtccacaaattgtttagaagtttcatctctttcttcccagggttttaatgagatgaaaataaaggcactgttcggctggtaagaattggtaagcatactaaacccgttgatcgtagtataggatagtatggatttctcttcttttaaaaaacggtctacttttcgcgatatttcatctgtacgctgtaaggaagaggctggaggtagtgacatattgactaatacataaccctgatcttcttcgggaataaaacctaacggaatttttttgcctaatactacaacggcagccatgattacggccagtaagactacaattcgcattgattttttggcaaaaaaagtagctcctgttagatatcttccggtaactttttcgaaaattcggttaaaaccggcgaaaaatttggccagccatccggtttgttcttcaattggtttggtcggttttaataacatggcacataaggcaggacttaaagacaaggcactaagggctgagaacgctaccgataccgcaatagtgatggcaaactgctgataaaaacgacccgtgattcccggagtcatggcaaccggtacaaaaacagcaatcaaaattaaggcaatggcaattacaggacccgatacttctttcattgcctgaatggtagcttcccgcggacttttgcctttttcgatatgatgaataacggcttctaccacaacaatagcatcatcgactacaataccaatggccaataccaatcctaagagtgaaagtgtgtttatcgaaaatcctaataaaggaaaaacggcaatggttcccactaaggaaacaggaaccgttattaaagggattaaggtagcacgccagttttgcagaaagataaataccaccagaattaccagtataaccgcttcaaagagggtgtgaacaatatcttccactccggcagtaatggcaagagtcgtatcgagtgactcctgatattcgatatcttttgggaatttttcagacaggtctttcatggcttttttggccagttcagctacttcaagcgcattacttccgggcatttgataaactgccattaccgcacttggcgaactgtttcgtcgtgcagacgaactgtaattctcggttcccagttcaattcgggaaatgtcgctgagtaaaacctgtgccccgtcttttttacttcgaacaacgatttctccaaattgtttttccgttaccagacgatcctgaagcgtaacaccataagtaaactcagtacctggaggtgcgggttcggccccgaattttcccccgggactaatcatgttttgagcgttcaacgcattttttacatcatcaaccgtagctcccagtttgctcatgacatcggcctttaaccagatacgcatcgaatagtcactccctccaaaaagagcaacctctccaacaccttttatacgagccagctgatctacaatattgatactcgcataattgtttaagaatttagcgtcatatttcggattgtttgaggtgacagtaaacagcatcatcggaaacgataaggacttttttaccacaaccccttgttgttttacactggaaggcataaaaggcgaagattgattttgccggttttgagtgagcatattggcattgtccagattcgttcccacatcaaaagttacctcaatggtacaggcgccatcagaagtattggtagatttcatgtacagcatattttccacaccatttactttttgttcaataggtgtagcaacagcttgttcaacattcaacgcattggcacctgtaaaactcgtattgattttaacaactggcggattaatgtcggggtattgcgaaataggtgttttttgtaatgccagtaacccgagtatcacaataataatactcattactatagcaacgattggtcttcgaacgaaaaattctcccatgatacgtggtgtataagttatttagttgccgcagcttgtgtctgacctaattgccattgaattacttttggtgtaataacacttccattctttagtaaagacgtacctcccatggctattttatctccaggttttaagccgtcttctattacataaccatcttttacagccggtcccggttttacgatttgcatgttgactttattgtctttgcctaatacgtaaacctgataaataccctgtacttcgataacagcacgttgcggaatcacgatcgcatctttacgaatgtcggtaagcaatccgatttttacatattgccccggacgtaataatttatcaggatttgaaaatgccgcttcaaaggttatcgcgcccgtagaaggatcaatctgtctgtcggcgaaactgactttacccgtttcaggataaacagagccatcggataatttcagagaaaccacagcgccggaaccttttaaagaagaattaggtttattgaattctctaaacaaacgaagaaattcctgttcgctcatcgtaaatcgaaccctgacatcacctaagtcggagattgtatttagaactgatgccgcaccaggtctcacataatcgcctactcttacttttgatattccgattaaaccagaaattggtgcgataatacggcaatagcccagttcgatttttgaattttccaaagaagcctgagacgctttaattttagcctgagacgcactgtaggctgatttagccgaaattaactctctttgactaacagcatttatctttgctaatggcgctatcatgtctaaatcggctttggtttttgccaaactggcttgcgattctgccagtgcccctgcggcttcgtccattttggttttataaggaagcgggtcaatagtgtacaatacttgtcctttggtaacaaaaccaccttctttaaaattttgactcataataataccgtcaacacgaggatttatctgaatgtctgacaggccataagtctgtccggtgtattcagattctacatttacatcctgatttaaaacagtaagaactgaaatttcaagaggtttgggtggtggcggagtttcttttttacaggctgaaagaaagaaaaggagtaggattgcagaaggataaattttgttcatttttaatttatattaaaatgtattaatattcaactaactagaaaccaaatatgtgcattgctaagttaacatttttttagcaaaaagtgaaaaaaagaatatccgcagctgttctgtttgtatacgacggtatttggattaaccttttacggaaacaggacgaacttttgaatgataaaataacaagcatctataaaattgggccttttttctgagatgaaaaaatgagatgaaatgttaatagcatttttaatctaaaaataattggtacttttgcaccagatttaaaaaaaatcaaacttattcttaacttaaaactgtttatagcatgcaactgtataacactttgagcgcagaagaaagagctatcatgatcgatgatgccggtaaacaacgattaacgttgtctttctatgcgtatgccaaaattgaagatcccaaaaaatttcgcgacgatttatttattgcctggaacaagcttgatgctttaggccgaatttatgtggctaatgaaggtattaatgctcaaatgagtattcctgccgaaaatttggaggcttttagaacaactctggaagtatatgatttcatgaaaggcatccgtttgaatgaagccgtagaacatgacgatcattcctttttaaaactaacgatcaaagttcgtcacaaaattgtcgctgacggtttgaatgacgaaacttttgatgtaaccaatattggcattcacctgaaagccaaagaatttaatgccattcttgacgatcctgatacaattgtggttgattttagaaatcactacgaaagtgaagtagggcactttaaaaatgcaattactcccgatgttgaaacttttagagaaagtttaccaatcatcaacgaacagcttcaaaatcataaagaagataaaaaccttgtgatgtattgtaccggaggaattcgttgcgaaaaagcaagtgcctattttaaacaccagggttttaaaaatgtctatcaattagaaggtggtatcatcaattacgctaaacaaattgaggaagaaggcctggaaagcaaattcatcggaaaaaactttgtgtttgataatcgtttaggggaaagaattacagaagatattatttcgcaatgtcaccaatgtggaaaaccttgtgacaatcataccaattgtgaaaatgacggctgtcatttattgtttattcagtgtgatgaatgtaaatcggcaatggaaaactgttgttcaacagaatgtctggaaatcatccacatgcctttagttgatcaggttcgattgagaaccggaaaacaagttggaaacaaagttttcagaaaaggaaaatcggaaaatttgaaattcaaacattcaggtgatttacccaatacagctttggctgcagcagaaaaacctgttgacattcgtcagaaagtaaaagtaaaaaaagtacttcttggaaaagcagagcattattatgtaaaagcccaggtggcgcagtttacgattgaaaatcaagagttaaatgccggagataaaatcttaatttccggaccaacaaccggtaatcaggaattggttttagaaagactgattgttgacggagccgaaacttcaatcgctaaaatgggtgataaagttacttttgaagttcctttcagagttagattgtcagataaaatatataagattctggattaagcactgacttaattattagaaaacctaacagattttaatgctgttaggttttttttatactccgaaaacaacaaaccgcacaggtttcaaaaacctgtacggtttactttataaaacaggatttttttatgtggtaaacggattctggttgtttttctaattaataaagaatgaatttaaataacgcaattgtgttgcgataaaattaaataccctgtaatcaaaattagagggtattgattattaatggaatatgtagtcttcgacctggtcgtagacctgccattttcctttcactttctgcatgattatagttttgttttcatgaatgagaccttctatatcagcagttgatccacgtgaaaagtaaaacaaaacatattttttgtttttataaaaaacagggtcagatattgagaatacaagtcctggtttgttttcatacttatccagaaattttgtgttccacattcccaatctattttcaaaaataaaatcaaatccaggaaaatcttttggtttccagtattttttaatggtgtcattggaataagtttcaagcataatgtcataacttttttgatcaaataacgaacttctgtagtttttctggacttcagccgttttgtccccaccataaaatatgcgtaaagcattgcgaagatctgctttgtcttttatgataattatgctttcattatttgtaatttttgttttaaggaaagtattaattgattcgtacctgctatggttaatagatgagcatgaaagtagtaatgcctggaatactattaaaattaagatctttcttttcataattgttttctaattacatggttttccttggggattttggtttcctctggatttgtttctggcttctaccgttttacgttgcgcaattctgtccttatcagcagttgatagtttagcgttataaattggagtgccttgcaagctaccccatgctaagtctttgtacatttgttgagctgcacctgaggcaacaggtgttccggtgttaaattcctgtaaggcagaagccattatgtcaacatagcgatttgcaatttcagcatgatgtgcatcagccatgtcatttgacggagatccgggattagtacttcgtacataagcttcaaataaagttggaaaatcggataacgaagaatttccggttgatttttgttgatcgataatacttaaaaaataagcatgtattatttcgtgaattagtgttgttgctaccgataaatccgttggaggtgagtttggttctgagtctataactccatttagataatcctgattaattgtaatttgataattgttatcagacaatttgatagtttgcccaaaaacggatggacctcctaatactggtcctttttgcatagtaacatcataaggagagattggacctccaaaacgttgtaacatcttggtaatgtcattttgttttaaattttttagtttttcaagagctgattttccgcaaggatccagattgttgtctttaatttgttccaccctattccaatttgccgatccgccactagaaccaccaccgattggtactattggaggatttacaggatttgtaatagggttgggccagggactgcctccaggacctgttacaactacctcgtttagtttaatagcgccttcgtctccgtggcagttattgcaaacacccgctccacttgatttcgaaaagagattattaccattggctatcccttgtttataattatcttttctcgtatccatggtctctaagttagtaattcttaactcaccggtaaacgattctagtattttgtgtgtggctattttttgcagatcctctatttcttgtgaatctttaaaatcaaagctccataattttcctgtaatattataatcattgatgtccaaaataattttttgtaaaagaaaagagttggaagattttaccggaattatggcaacaaaagagttttctgcgctttgttgatagagggttgcggagttccaaagtacatctttttcattgatagtgtgttttgagtttagccattcttttgagcggataagtaatgctgattcctgtttttcaatactggtgtaatcattttcaggagaacagctgaagattagtaagcataacagaacaatcgttaacagattgtaagggtgttttttcattgtattatttttattaaaactgaataaatttaaggcaaaagtatttagaagtttttttataagaaaaaatatatgatttgatatttaaagaataaaattgtaggtaaagttctatagggtatataaagtttaaaagcagtgttatttttaattaacaaaaagttaacaatacatttgtatatacaaatataaaaagttatacatttgtatatacaaattatacacttacgactatgacaattgaagaggttataaaaagtacagttaagatggataatgcgagaaaagttattctgaatatcatgtacacgcaaaatgtgattcaggatcatttcaacgaattgataaaaccgtatgatctgtccggagagcaatacaatgtactgcgtatattaagaggacaaaaaggaaaccctgctaatatgtgtgtgatacaggagcgaatgctggccaaaacgagcaacacgacccgattagtagacaaattattattgaaagatttcgttaccagaaatgtttgtcccggtaatcgacgtaaaattgaagttctaatcacccaaaagggattggatgtattgaaagaattagatccgaaagtagacgagcacgagcgtttgtttgccaagaacataagtccggaagaattagaattattaaaccaattattagaaaaatacagaacccaacaaaattaaaattatgagtacattattagacaatctaaactggagatatgcaacaaagaaatttgatgccaccaaaaaaatatcttcacaagatttaaacactttaaaagaagctgttagattaagtgcttcttcatacggattacaaccctacaaagttattattgttgaaaatccggaaatcagagaaaaattaaaagctgctgcttacggacagacgcaaattacagatgcttctcaaatatttattttcgccaacgacttaaatcttggagcagattctgtagatgcttacatcaacaccatcagtgaaacaagaggtgttcctgctgacgctttaggcggattcagtgacatgatgaaaggtactatttcaaatctttcagttgaagcaaaaaatatttggacagcaaaacaaacttatatcgctttaggtactttattgagtgctgcttctgaattaaaaatcgatgcgactccaatggaaggatttaatgctgctgcatttaatgaaatcttaggttttgacaaattaggattaaacacttctgttatcgcaactgtaggatacagacatgatgaggacgaaactcagcactacaaaaaagttagaaaatcaaacgaggatttatttatcactatataattattattaatcaaaatcaattttaacaaaatgaaaaatttaaagacaattgcaatagcattattcgtagcagtagctggactttcagtaaacgcacaaactaaaaaaatcgatgtaaaagcaagtactatcaaatgggtaggtaaaaaagtaaccggagagcactcaggaactgtaaacttcaaagaaggtgcagtagttttcaaaggaaaaaaattaacaggtggtagcttcactgttgatatgacttcattaacagcaactgatatcaccggagaataccaaggaaaattaaacggtcacttaaaagctgacgatttctttggaactgacaaattcccaactgcaaaattagttttcaaaactatcggagcaaaatcaactgatgtatacactgtaactgctgatttaactataaaaggaatcactaaacctgtaacttttgatatcgctgtaaaaggaaatactgctacaacagctttcaaagtagacagaactaaatacgatatcaaatacaactctggtaatttcttccaaaacttaggagacaaaactatcaatgacgaatttgaattgactgtagctttaaaattctaatagcataaaaatcagcaattccttattttataagaaaaaccccaatagtttaacactattggggtttatttttatatttttcccaaaaaaataacattcttaatactcccctaacgctttcgtaataccatactggactttgattaacattggccttctacttttgaacttattaaaaatcaaaaactggaaatcaaaatcatagttatgaaagcaaaaatacatcttatagttgtcacggttcttagtactttttttctacaggcacaacaacagcctaaaggtattattggtacctcaaactggatgaacaactggaccaattttaaacctgccaataccgaatatagcgaagccacaaacattattgcaggaactattaacaaagacaccaaactccttaaacgcaatacgtatcagttagttggagttgtttacgtcaccaacaatgccgtattatctatcgaaccgggaactgtaataagaggcgacgataaaacatgtggaactttggtaattacaaacggatccaaaattgtagccgaaggtttagaaacagaccctattgtttttacatccaataaagaaacgacccaaagaaaaccgggagactggggtggaattatcattttgggaaaagcaccaatcaatacacttggaggagtacatactttaccttttgatctcgaaccaatgctaaaccactatggcggtcaggatgccgaagacaactcgggagttttaaaatatattcgaattgaatattccggacgaaaactaagtgctgccaaagaacttaatggactttcgcttgccggagtaggaaaaaaaacaattttaagcaacattcagatcagttactctaatgatgactctttcgaatgttacggaggagatttaaacctgaataatctggtttcttatcgaactaccgatgatgattttgattttactcagggtgcacaaatcaacatcaataacagtattgccattcgtcatcccttttcatcggatatttcaggctcaagatgtttcgaagttgattcttatgacaaaatcggaaatacagacatgagcaaaaaattaactaaaataaacgccagtaacattacacttataaatctggaagaaaataatcagggacttgtgagagaatcagtctatgtgagagaaaatactttttttaattttacgaacagtattgtttccggatttacaccttttgttctactggaaggaaatattggaaacggcgaagttaatttgggaaaaattaccttcaaaaacttaatcgtcaataactgtaatggtggaatcacaagcgaagccggcggagcaaatactgcaattgaaaattattacaacaatcccatttttgacattaactttactaaaatcaaaaacagcgaattgtttacaacaccaaatatcaaaggaagtccggactttaggatgaacgtaaacaataccatagccattggcaactaagaccttaaaacaaccttacaagaacaaaatttaacaaattttaaaatttaaagaagtttttttttactttttataccttgtaattcaaattacatttatatatttgtgaaatcaatataagatatgaaaacaataatgaacaatacttggtggtggaagaatttacgtgaaacgtcgtgaacaaagcttcctatggtattataaaactataaatataaaaggcttgtcatcacgacaagcctttttttttggtctgaactctgataagaaaatctattaaaaataaaaaaacgaaaaactttgaaaccatttacactcaacacacactacaaacaaattctggcagacaccattacaccggtaagtgtttattttaaaatcagagacaaattcccaaatagcttactattggaaagtagtgattatcatggaaatgataatagtttctcttacatctgctgcaaccctattgcaaccattaaaattgagaacgaaatcatttcaaaaacttttcctgacggaacgaaagaacgaatcactatcgacagttcaacgaatattccggaaattattcaggaattttcgagccaattccaatcagagaaaaatgattttaaatttatcaataatggtttatttggatacatttcttacgatgctgttcgttattttgaaaaagtttcgattgccaaaaaagacagagctacctcaattcctgatgtattttatgctgtttatcaaaacatcattgccatcaatcactttaaaaacgaagcgtacattttttgtcatagtgttgatggaagaaataatatttcggagatcgaacaattattacaatcgagaaatatagcatcttacaaattcagcaaggaaggcgaaggtttctctaatttaaccgatgacgaattcaaacacaatgtagctttagccaaaaaacactgcttccgtggagatgtttttcaactggtactttcacgtcgttttacccaaggtttcaaaggcgatgaattcaacgtatatcgagctttacgaagtataaatccttctccgtacttattcttcttcgattatggtgatttcaaaatatttgggtcttcacctgaggcacaaataattgtaaaaaacagaaaagccgaaattcatcctatagccggaactttcaaaagaaccggaaatgacgaacaggacgctgttttagccaaacaactatcagaagataaaaaggagaacagtgaacacgtgatgcttgtcgatttggccagaaatgatttaagccgaaatggacatgatgtaaatgttgaaaaatacagagaagttcagtttttctcgcatgtaattcatttggtttccaaagtaaccggttatttacatgaaaaagcaaccactatgcaggtggtagccgatactttcccggcaggaactttaagtggagctccaaaacacagagccatgcaactgatcgaagattatgaaaaaacaaatcgtaatttctacggaggagccattgggttcatggattttgaaggtaatttcaatcacgctattatgattcgaactttcctgagtaaaaaccaccaattacactgccaggctggtgccggaattgttgccagttctgatgaagaaagtgaaatgcaggaagtttacaacaaactaagagccttgaatacagccttagagatggcagagaaaatataagtcattttgtttcaggtttgtctgcgttacaacaacgtgaaacttgaaacttaaaacttgaaacaaaaagaacctgaaacaaaaagaacctgaagcttgaaacaaaactaaaaaaacaaccataaaaccaacctaaaaaaaacgatgaagaacattattccatttttgattgccattgtattatttacttcctgtgaagctaaaaaagaatcaaacacacttcctttaagcggaacctggcgtctgatatcagctgaaaccaccgaaaaagattctacgttctcaactttcaatccgaaaacaaaaatgattaaaattataaatgatagccattttgctttttttaatcatgatttaaatagcggtaaggattcaacgaatgcggttttctttggcggaggtggaaaatatactttaaaagacagtatttataccgaaaatctggaatacttcaataaccgtcaatgggaaaacaataagtttgagtttgttgtaaaaattaaaaacgatactctgattcaaaagggaatcgaaaaattagaaaaattaggaatcgatcgtattatcactgaaaagtacgttcgggagaaataaacagaaatcagttgccagtcacagtattcagtctcagaaaacttagcacctcagaaccttagcaacttagaaccttaaaaaaatgaaaaaaatattagttatagacaattacgatagtttcacttataatttagtacactatctggaagatttaaactgtgaagttacggtatacagaaacgatgagtttgatattgatgaaattgcatcttttgaaaaaatactactttcaccaggtcccggcataccggatgaagcagggttattaaaagcggtgattcagaaatatgctccaacaaaaagtattttaggcgtttgtttaggacaacaggctatcggagaagttttcggaggaacactttcaaacctggacaaggtatatcatggtgttgctacaaatgtaaaaacagtagtttcagacgaaattttgttcgaaggtttgggtaacgaattcgaagttggtcgctaccattcctgggttgttgatgccaacttgcccgatgttcttgaagccacttcaattgatgaaaacggacaaatcatgtctttaagacacaaaacttttgatgtaagaggtgtacaatttcatccggaaagtgttctgacaccaaaaggaaaaaggattttagagaattggattaagagttagacattagtcaaaagttttaaagtcgaaagtcccaaagtcaaaaacttcacctttcctattaaaacttaaaacagcaatcaattccagaaaaaacatcaaattttgaagactttatgaccttcgactttagactttaagacttaaaaaaaaatgaaaaacatactaaataaattaatcaatcacgaagtactttcgaaagaggaagccaaagacgtgttgatcaacatctcaagcggggcttacaacccaagtcaaatttcggcatttttgactgtatttatgatgcgaagcattaccattgatgaactttccggatttcgagaagctttattagaattgtgcattcgtgtggatttatcggcctacaacgctattgatttgtgcggaacgggtggtgacggaaaagatactttcaacatttcgactttagcttcattcgtagctgccggagcaggaataaaggtagcaaaacatggaaattatggggtctcctctatttcgggatcaagcaacgtgatggaaaaaatgggaataaaattcagcaacgatccgtcatttttagaaaaatgcattgatcagacaggaatttgtgttttacacgctcctttatttcaccctgctatgaaaaatgtagggccaatccgaaaagaactagcggtaaaaacattttttaacatgttaggtccaatggtaaatccatctttccctaaaaatcaattagttggtgttttcaatttagaattggcgagaatgtatgcttatttatatcaaaacaccgatgttaattttaccatcctgcattcgcttgacggttacgatgaaatctcgttaaccggtccgacaaaaatcattacaagcgatatggaaggcatgttgaaacccgaggatttcaacgttcgccttttatcgcaaagagaaattgagggaggaagaaccatcgaagaatcagccgatatgtttgtgagtattatttccggaaaaggaagtgaggctcagaataatgtggtttgtgcaaatgccgcaatggccatttcaaccgtaaccaaatgctctcctcaggaaggttttaagcaggccaaagaaagtttgttttccggaaaagggcatcaagtgcttaaaaaattacaagaactaagtaagtaaaaaatagtttcaagtttttttgtttcaggtttcaagttattgaaaccgggaacttgaaacctgaaacctgaaaccaataaaacaatgaacattttagataaaataattgtagataaaaaacgagaagtcgttctgaaaaaatcaatcattcccgtttcacaattggaagcttctgtattttttggaagaggaacgatttctttaagtcaaaaactgaagacaagttcgacaggaataattgcagagcacaaacgccgttcgccgtctaaatctgtaatcaatcatagcttcacagtagaagaagttgttaaaggatatgagaatgcaggcgcctgtggaatttcagttttaactgatggaaaatactttggcggttcattagacgatttacttctggcaagagcaagtgtaaatattccgcttttgcgaaaagaatttatcgtcgatgaatatcagattttagaagccaaagcatacggagccgatttaattttactgattgcagccgttttaacccgcgaagaaatcaaatccttatcggaatttgccaaacaattagggttagaagttttactggaagtacacaatcaggaagaattagagaaatctataatgccgagtttagatatgattggcgtgaacaacagaaatctgaaaacctttgaagtaagtctggatttcagcaaacaactggccgctcaaatcccgaatgattttgtaaaagtttcagaaagcggaatttcatctattgaagccatttcggaattaagaccctatggttacagtggtttcctaatcggagaaaactttatgaaaacagataatgccggtcaggcagcaactgaatttattagacagctgtaggctgtaggctgtaagctttaagccgtaagctgaaaaccgaaaaactttcttaacattactaatttagcctaaagcttactgcttaaactctaaccaatcgataaaaaataatacggcatgaaacaaaagcttatagcttaatgcctattgcttaaagcataaaaataaaaaaaaatgaaactaaaaatatgcggcatgaaatatcccgacaatatactcgaaacaggagcactcctgcccgattatatgggatttattttctggaaaaaatccgcacgttattttgacggaacgattccggaattgattcataccatcaagaaaactggtgtttttgtagatgaaacggttgataacgtattatcaacagcagacaagtatcatttacaggccgttcagttacatggaaaggaaaccgtagaattttgccaggaactgagagctaagatcgatgccaaaattgatgtgactattgaaatcataaaaacattctcgatagatgaacattttgattttgaaattctggcaccttttgaaaaggtttgcgattattttctgtttgatacaaaaggaaaattaccgggcggaaacggaaccacttttgactggaaaatactggaaaattataaatctgagaaaccaatctttttgagcggtggcatcggaattgaagaaatacctgcgataaagaacctcaaagtgcctatttacgctatcgacgtaaacagtaaatttgagacagaaccaggattaaaaaatataagtctattaagaaagtttcagaaaaatctaaaacctgctactttaaacccaaaacaactatacaatgaattataatgttaacgaaaaaggatattacggagagtttggaggcgcctatatacccgaaatgctttatccgaatgtagaagaattacgtcagaattatctaaaaataacaagcgaaccagattttaaagcagaatttgaccaattactaagagattatgtaggtcgtcctagtccgctttattttgcaaaacgtttgtcggagaagtacaatactaagatatatctgaaaagagaagatttaaatcataccggggcacataaagtcaataatactattggacaaattctggttgccaaacgcttgggtaaaaaaagaattatcgccgaaactggtgccggtcagcatggtgtggcaaccgctacagtatgtgctttaatgggaatggaatgtatcgtgtatatgggtgaaattgacatcgcacgtcaggcaccaaacgtggcacgtatgaaaatgttaggcgccgaagttcgtccggcactttcaggctccaaaacattaaaagatgctaccaatgaggcgattcgtgattggattaacaatcccgtagatacacattatatcataggttcagcaattggaccacacccctatcccgatatggttacccgttttcaaagtgttatttcagaagaaatcaaatggcagttaaaagcaaaagaaggacgtgaaaatcctgattatgtagtagcttgtattggtggaggaagtaatgcggccggaacttattatcactttctacacgaacctgaagtgggaattattgccgtagaagctgccggaaaaggtgtagacagcggtcatagcgccgccaccagtaaattagggaaaatgggaattattcacggctgtaaaacccttttaatgcaaactccggacggacaaatcaccgaaccgtattctatttctgccggtcttgattatcccggagttggtcctatgcatgcccatctggcgcaaaccggtcgcggggaattcttttctgtaactgatgatgatgcaatgaacgcaggtttacagcttaccaaactggaaggaattattccggcaattgaaagtgcacatgcttttgctgttttagatcagaagaaattcaagccaagcgatattgtagtgatcagtctttccggtcgtggagataaggatttagacaattatattgattattttaaattgtaataagatagcaactatggaaaagttattctcttacggaacattgcgatcaaaagaaattcagatgcgcctttttaacaaggtgttaatcggaacccgagatcagcttcatggtcacaaactaaaaagtctgcaaatcgaagaagaatttggaatggcagattatgttgtagttgtaccaagcgcatcctctacggaccctatacacggtgttgtttttgacgtcacaaatgccgatttagccaaagtagatctattcgaatctaatgcgtataaaagagttcaggtaaccttgaattccggaacagttgcctggatttatatcgaaaacaaataattctataccatgattctggcagcagcacaaacaaaaccactccgcggggatattgattccaacttattagagcactatcgtcttgttgaactagccgttcagaatggagcaaaattaattgcatttcctgaaatgtcaatcacgggttacgaaagagagtgcgctcaaaaactagcgtttcaaaaagacgattcgagattagatcgtttaagaaaattagccatagaaaataatatcgtcatcattgcaggagcaccaatccaaattgaaacaaaattatttatcggcgaatttattattgctccggacaattctgtttcgatatacaccaagcaatttttgcatgaaggagaagacgatttttttcaatcttcgtttgattataatccgatgattgaaattgaaaatcagaaaatttcatttgctatttgtgctgatattgaccatccgctgcatccgcaaaatgcatgtaagagagaagcaaatatttatattgccagtattttcttttcgccaaacgggattccaaatgcttacaggcatttacaaagttatgccgagaaacatcaattgaatgtgctgatgtctaatttcagcggagaatcgtggggatcaccatcagccggacaaagtgctttctggaataataaaggtgagcttattgggcagatgaacgatacagattcgggaatattattagtcgaaaaactaaatgaggattggacaagtaagattttaaaaaaataaaaataatgccacagatttcaaagattttaacagattaaactattaaaaaaatggttgaaatccttttaatctgtggcacaaaaaacataataaaatgaacagaataactcaaaaattacaagaagataaaaagattctttctatttatttctcagcgggatatcccaatttgaatgataccgttcccatcattcaggatttagaaaaaaatggtgttgatttaatcgaaattggcttgccttttagtgatcctttggctgatggtccaaccattcaggcgagttcaacacaggcacttcacaatggaatgactacccaaattctttttgatcagttgaaaaacatccgcgaaagcgtaaaaattccgttaattattatggggtacttcaacccgatgctgcaatacggaatcgaagaattttgtaaaaaatgtgccgaaattggtatcgacggcttaattattccggatttacctgttgatgtttacgcagacgaatacaaagcaattttcgaaaaatacggtttaatcaatgttttcctgattacccctcaaacgtcagaagagcgtatacattttatcgacagcgtttcaaatggattcatttatatggtgagttcagccagcgtaacgggttctcaggccggtttcggaaatactcaggaaagttatttcgaaagaattgcccaaatgaatcttaaaaacccacaaattgtaggttttggaatttcaaacaaagaaacatttgatcaggctactaaatatgccaaaggggctattatcggaagtgcgtttatcaaacatttaagtgaaaacggttctggaaaaattagagaatttgttggagagattagataattaatttttctactaaatatataatactgtctagtttgtcatttctcctccgtcgaaatcacactcgtaattcgacaaagattgactattatgcaggaggaatttcttatgcgatttctcccttcggtcgaaatgacaaaaaaccattaaaagctgaaaacaggtctgttttcagctttttttgtgcaaaattatcacgcttaaaaagtgttaatattttgttaaaataaaattaaacaactgtttaatttaaacgcttgtttaattttgtacccgattagaaacaataccatgttaaacttagaattaaacgataaaaaaattcaaattctggaagttgctgaaaagctattctcagaaaaaggatttgaagggacttcgatacgggatatctccaaacatgcaaaaattaatattgcaatggtttcgtattactttggctctaaagaaagactactggaagcccttattatttacaaaactgccgatttaaagcttcaacttgaaaatttattacaggaaaatattgaacctctcgataaagtcaataaattaatcgaaatttacattacgagaataagctgtaacaaagggattttcagagttttacactttgaacttaactctaaaaaaagagagaaaagtatgatcgccttcacagaacttaaaaaaggaaatttaaaatcggttgagagtattattgcacaggggcagtctaaaggagtttttagaaaagatgtaattattccactcattactcctaccatcattggaaccttttttcactttcacatgaataggcctttttttgaggaactattaaatttaaaaacagaagagatgtacaacgagtacatcaaaaccagtcttacaaagcacattcaacaaactataaaagcgctacttgtttatgaaaattagtcaattaatgctctttggggttttcttcatcggaatttcgtcaatagaagcacaagagaaaacaagtttaaccttaggcgaggccgtaaaaatggcttgggaaaaaagtaacgaagttacacttgccaactctaaggtaaacacaaaaaaatacgaattaaaaagcgtaaaagacaatcaatacccggatattaaaatttccggtcaataccaacgtcttacaaaggcatcgattactatgccaaatcaaagtgaaaatgcatctatcgcatctccggacagagcaatgtttggaatggcaactttgagtcttcctttattttcaggattcaaaattcagaatagtattgaagcctacgataacttgtacgaagcggaaaatgctactgctgccaaaacgaaagaggatgttgctttaaaagtaattacctattacactgctttgtacaaagctcaaaaaacattggatgttttaaatgaaaatcaaaaaagtgcgaaacaacgtgttactgattttacagaattggagaagaatggaattattccaagaaatgatttattaaagtctcaattactggtttcaaaaacacaattatctattgatgaagccactaacaatcttaacaatatcaacttctatctaacgactttattaaagttagaccctaacacaaaactgcaggttaatgaagctgattttttcaacttaaaaacaagcaatgcaccaacatcagatgcaatagctcttgaaaacagaaaagatttagaagcaattcgtttgcagcaaaaagctactgagtcaaatatcaaagtagcaaaggctgcctattatcctacattagccttacttggcggttatacggcactggaccttaaagacatcataacggtgagatatgctatgaactttggattaggtttaacttatgacttatccggaatttacaaaaacagtgcccatgtacgagtagcggaaagcaaagctctggaagttaaaaatagtgaggctgtaatgacggaccgtattaaaattgaagttcaaaaatcaattgaagattatgatttggctataaatcaaagtgtggtttacgatgaagctcttcaacaggcaagtgaaaattacagacttgtaaaagataagtttgacaatggtttatcagatactaatgatttggttgaagctgacgttgaacaattaagcgctaaaataaataccgcattatcaaaagctactatcattcaaaaatattacgaattactttcggtatccggacaattatcacaatcattcaatctttctaaaatataatcgacagctctcatggaaaagaaaaaaacaaatactaaattcatcattatactagccgttttggttttagtgggcggaacttacggaataactaagtacatgcattctttagctcacgaagaaacggacgatgctcaaatcgagaaaaaaatgaatccgattattccaagagtatcgggatatattagtaaagtatacgtaaaagataatgattttgtaaaaaaaggtgatactttgtttacgattgataaaagagattatcagttaaaaatagatgaggctaatgctgctttattaggcgctgaaggacaatacgaagctgcaaaagctgacattggaagcgctagtgcaagcatctctgtatcggatgcgcaaatgagatctgcaactggttctatcgaaagcgcaaaaattagattaagacagattacaaacgattacaaccgttacaataatttgtacaaaacacatacgattacaaaacaacaatacgaacaggctctatctgcaaaagaagaagccgaaaaccaggtacgtgttttgcaagatcaacaacgagctagttcttaccaaaaatcagtaattcaatcgaaatcaaaagtttctgacaaacaaactgaagtagcttccgctaatatcaaaaaagcgaaaacaatgttagacgttgctcatttaaaccttagctatacggttgtaactgctgcaattgacggacaggtttctaaagtagacattcaaccaggacaattagttcaaccgggacaatctttattctacatcatcaacaacaatgaagcttgggttgtagctaacttcaaagaaacgcaattaaacaaaatggttgccggacaaaaagtaagtctaaaagtggatgcttatccaaactatgaatttaaaggtactgtaacctctttttctcctgcaacgggatctcgtttttctttattacctcctgataatgcaaccggtaacttcgtaaaaacaattcaaagactacccgtaaaaattagtttagacgaatcaaacgatcctgagaaagtaaaattactaagaccagggatgaatgttgatgtagatgtacatttaaaataacataatggcagcagtacaagcagacgatgatttagtagaatacggattcagacgtgtcattattacgattacggcggtactttgtgccctgcttgaaatcgtcgacacgaccattgtaaacgtagcactaacagacatgcgaggtagccttggtgctactttgactgatgtggcctgggtaattacagcatacgccattgcgaatgtgattgtaattccgatgacgagctggctttcacaacaatttggaagacgtaattattttgtggcttctatcataatatttacggtctgttcctttttatgcggaaacgcctccaatatttgggaactggtagcctttagatttgttcagggtatgggtggaggtgccttactggtaacagcacaaaccattatcaccgaaagttatcccgtagcaaaacgtggaatggctcaggctatttacggaatgggggtaattgttggaccaactttaggaccgccattaggaggttatttagtagacaactactcctggccttatattttttacattaatattccattggggatcattgctacaattttagcattaaccttcgtaagaagtcctaagtatggagaaaaattaaaagccaatcaggttgactggtggggaattatattgcttgcagcctttatcgggtctctacaattcgttctggagcatgggcaacaagacgattggttcaacgattcaactatcataactttaagtgtggttacggttttaggattggtcttatttatttggagagagcttacttataaacatccaatcgtaaacttaagtgttctaaaggatggaaatcttagaataggaactgtaatgtgtttcattcttggtttcggtctgtacggatcgactttaattataccaatctacacgcaatctattttaggatggaccgcaaccgatgccggattattattgattcccgggtctattaccacagcaatcatgatgccttttgtcgggaacatgattcagagaggagttccgcagggctatatggttggagtaggatttttggtattctttttctttacctttatgatgcagacccgtatgactcctgataccggagttgaacatatgtattggcctctaattttaagaggagttggtttaggattactttttgtacctattacgacactctctctatctaccttaaaaggaaaacatattggtgaaggagctgcttttaccggaatgatgagacaactaggaggttcgtttggtattgccattattaccacgtttattactcgtttaggacaggaacaccgagtaaacttactaaccaagttagatcctgcaaaatacgaagtacaacagcgtattgcaggaatgcaaagagcttttatgtctaaaggatatagcgcagacgttgcattgaaaaaagcctaccaagccattgaatattctgtaatgaaacaaagtaccgtaatggcttatatggatattttcatgtatttgggaattatgttcttatgctgtattccaattattcttttaatcaaaaaaggaaaaaacaagattaatcctgctgatgcaatgcattaataataattgatttataatacgtaaaaacgccgagttcattcctgtaactcggcgtttatttttttcaaacattaataatttaaccgcaaagcacgcaaggatattatttctaagaagctttaaatatgaaaagttcgcaaagctttgtgtaaaaactttgcgaactttgcgtaaatcattgtgttctttgcggttaaaaacctaagtatctcagcatcttagcccctcagaaccttaaaaaaaacctatctcgtaaacaccaaatgatttccctttgaaagattaccatcaaactgatacccttcataattaaatccttttaagtcttcaatagtttcagcattagtatcaataatataacgcaccatcatccctcttgcctttttggcaaaaaaactgattattttgagttttccgtctttataatctttaaagtccggtgtgatcacaggaacttttaaagcttttacatctaccgctgaaaagtactcgttacttgctaaattcacgaacagctctcccttagacaactctttatttaatgcttttgtcacggttggtttccaaaactcgtgcagatttttatactcccccactggcaattttgttcccatttccagacggtaagcctgcattaaatctaatggtctcaaaacgccgtaaagtcctgacagaattcgaagtttactttgaagaacgtcgagtttctccaccggaatagtataagcatctaaccccgtataaacgtctccatcaaaagtatagactgccggacgggcattttcaggtgtgaatggtgttttccaatcctgatttcttttccagttcaaatctgataatttagctgaaatcgacattaattcagataactcagcaggttttttagtctttaagattttatgaacctcacgtgcttcttttaaaaaataaggttctgtatgttgagtagtaggtaattctttttcgaaattcagtgactttgcaggcgatataacaattttcatgtgtacatttttatatactccaaaaatacaaattgaatttttaaaaataacagatctgaattgatttgttcgatcgcattataaaggttttttttcgccacgaattcacgaattaactttttaaattaaataaaatccgtgagttgtttcgcacgttcacattactaaatatttattttgccacaaattttcgctaatttctgtttctatacctaatctaattcgcagaaattcgtgtaattcgtggcaaacttttttctattaataaaatcctagcactcaaactgtgaatttattcaaaaaagtgagccttagattataataggcattttctatgtcgtaaatttgcaaccataaaattccaaaaacattttcaatgcaaaattgaaagttgtattcaaaaaaatagccacgaattcacgaattaaaattttttaaattaattcgtgaattcgtggcagaaaaaaatttagaacatgacaaagattttgtaccagctggaaagttatcaaataatgggaattttatttgatgttcatagaaatttaggtggaggcttttctgaaatcgtatataaagatgctttagaatatgaatttaagaaagagaatattccatttgaaagagaaaaagaatatttggtaaactataaagacataatattgaatcacagattttacgctgattttattttgttcgataaaattgtacttgaagtaaaatcgagtgaatttttacatccaaaatacatttcgcaatgtcttaattatctcaaagtttctaaaacgcatttagcaattttagcgaacttcaattctgtctcacttgaatacaaacgtattatttaataaaattcgtgaattcgtggctatacaaacaaattataaaactgcattacaacataaaatcttcgatatcatttcgaaggcatcccgggaacttaatgttgacagttatgtcatcggaggttttgttcgggatttacttttaaacagaggttctaaaaaagatattgatgttgttgctgtgggcagcggtattgaattggcattaaaagtttctgaattattgcccaacaaaccaaaggtacagatttttaaaacttacggaaccgccatgcttcgttttgaagatactgatattgaatttgtcggagcaagaaaagaatcttacagttctgacagccgaaatccggtagtggagaacggaaccctggaagacgatcaaaaccgtcgcgacttcaccattaatgctttggctttatcattaaacgaaaaaaacttcggagatctttctgatccttttaatggtttgtctgatttagagaacaaagtcatcaagacccctttggatccggacatcacttattctgatgatccgttgcgcatgcttcgtgcgattcgttttgccacacagttgaatttcgaaatagaagaaaattcattgaatgccatcacaaaaaatgctgaccgcattaaaattatatcaggtgaaagaattgttgacgaattaaacaaaattctctccactcctaaaccttcaaccggctttttactattgtaccaaacaggacttttagatttaattttacctgaattaacagcattaaatcaggtcgaagaaattgaaggccatacccataaaaacaacttttaccacacactggaagtggtcgacaatatttgcccgaatacagatgatgtctggttacgctgggcagctttattgcacgatattggaaaagcaccgacaaaacgtttcaataaaaaacaaggctggacttttcacgggcatgagtttttaggtggtaaaatgactaaaaagattttcgaacgtctgcacatgccgttgaatcacaaaatgaaatttgtacaaaaaatggttatcatgagttcacgccctattgttttggctgacgacatcgtaaccgatagtgcagtgcgtcgtttggtttttgatgccggtgaggatgtcgaaaatctaatgactttgtgtgaggcagatatcaccaccaaaaatccgtcaaagtttaaaaaataccataaaaacttcgagctcgtccgcaagaaaatcgttgaagtcgaagaacgcgatcatgttcgtaattttcaaccgcccatttcgggtgaagaaattatgaaaatctttgatctgaagccttcaagagaaatcggaattttgaaagaagctgtaaaagaagcaattcttgaaggtgacattccaaatgagtatcaggctgcttatgattttgtgattaaaagagctgaaaaattaggcataaaaaaagtataaagaattaagtattattttataaaatgaaaaaagaaaataaatcagtaatcatctggttgctatcgggttgtgctttattgtttttaatggttgtcgttggcggaattacccgtctgaccaattcaggtttatccatgaccgactggcatttggtaacagatacctttcctccactgacagaagcaaaatggaatgaagcatttgaacaatacaagaaatttccagagtaccaaaaaattaatattcacaacgattttcagctttcagattataaattcatctatttttgggaatggttccaccgcttcattggacgcatcatcggactggttttctttgttccttttgtttattttttaattcgaaaaaaactcgatcgtccaaccataaacaaatgtattgttcttctggcaatgggaggttttcaagggttcttaggatggtttatggtgcgcagcggattaatcgacaatccggatgttagtcatttcagactttctcttcatcttacttttgcctttattacttttgcttatacactttgggttgccttggatttaatttatccggaacgcaatgtttataaaataattccgcttcgtaatattgcaagaatagctcttgtcgctttactgattcaaattatttacggcggatttgtagcaggtcttaatgccggtttaatacacaatcactggcctttaatgagtgacggacaatttattcacgattcggtttttattgaacaaccaactttggttaaaaacttaatcgaaggaaaaagcggagttcagtttgtgcatagaacttttgcttatgtagtagtagcgcttatccttttcttatattacaaaggaactcgattttctctaaccagaaatcagtctaagggaatcgacgttcttcttgtttttgttttcattcagttcttactgggcgtttttacacttttatacagcgttcctttagctttaggattaattcatcaaattatggcttttttccttttgagtgccatgacctacactttgcaccgattgagtaaataataacttaaattatatagaaagagctggaaaattccagctcttttttatttagaatatggcccgaactcaaggctctctatatttgataacctattttttaaatcgaattaaaatccgctcctacaaaatgcgtcgagccaatggctctttgtcttaactattaaaactgttcaggcacattataaaattccgaaggaatgaccaatattgtagcaatggattttaatccattgaaaaataaattcaacccacaaaaaagttccgtaggaacaatacatgtattaaataagtttaccccagccagtttttaaagtcctgtactttctcgcggctcacaattacctcatcctctttataagtaggtaaaattacctttagccgtgaattggtgtacacctgaatttcttttatcgccgtaagcggaacaatgaattttcggctaacgcgaaagaaatcttttttatcgatttcctgctccaggatttccaaagtcgagtcaattaaataatttctattatcaaaagtatgaatgtaggttcctttattttcactaaagaaacactcaatttcgtctgtggtaataacctttaagtgctgcccgattttaactgtaaatcgttttttataattcttttcaaaggggtttgacaacatttgacgaatttgttcaaaatcaagttgcaaatttgaattttctgaacttgttttcggtaatcttgttctgaattttgcaacagcaacttccagatcatcttcatcaatgggttttaaaagataatcgatactgtttaatttaaatgcttttaaagcatattcatcataagccgtggtaaaaataatggcgctctgaatatttattttttcaaaaatttcaaacgataaaccatcagacaattgaatatccaaaaatatgagatccggatgttcgttattttcaaaccaataaacggattcttcaacagaatgtaacatggtctttacagcaatatctaacttttcgagttttcgttgtagtaatcttgccgccggtttttcgtcttctataattaatgtggtcattttgtaagatgcaaaaattaaaaattcagtttaaaattacttccatttatttttattttcagcctctttcttcattattttttgaattttcttttgctcccaatccctattaaaaaaaacatcagggccaaaaacggaaattccatgaatcactagagcaattccccaaaaaaaagcagtcgagtaaatttcccaatcacggaatcctctaatgacaaaatgatctcctatataactttgattcagacttgaaacaatgatgataatgttcaccaatatataaactcttaaatgcgaataaaagcctttaattctttttacttttttatatgccaaattgaaactttcgtctgtactaaactcatgtgaatactcttcgtacatctgtcttctaaactgtcccatattattttgatttaaaaattattgccattttgtattattgttctgtgcctctctctccatatacttttggatctttttttgttcccattcactgctgaaaaaaatatcagggccaaatacagtaaaagcatgaatgcctaaagctactccccagcatatcgctgtcgaataggtacgccagtctaacaatccgttttcataaacactatggctgaaataatctctgtttaaattagaaactataataatggcattcacaatcaaatacacttttaaatgcgtgtaaaaacctttgatttttttcacttttctgtaggctaaattatagctttcgtctgtactaatttcatccctgaaagcttcgtacctgtctcttctatatcgtctcattttactataattattgccatttatttttattctctctctctttttccatcagttctttgatctttttctcttcccagtcttttccgagaaccggaaacactttaaagactttcaaaccatgaaaaaccactccaactccccaccacattaagggccagtaaaaccataaatgtcttggtgatgtataaagattgataaaaatcagaaccagatttacaataacgtatgccgttagattgccatagaaacctttgatttcctccactctcttttttgcgaggtaatatttatcctcttcattcaaatctacttccatgattactcccatttttgttttttttcctttttctctaaaatgcttttcattttacgctcttcccattcttctccaaaaattttaaaagaagcgaatatctctattgccgatactacaaaaacagtagtccaaatacacatgacaaatccgttcagatattgtacaggaaaaatattaagcggaagcccaaaataatcttttaaaatataaagtataagacctgcactatagaaaatcacatgagtgtaaaaagcctttaacttcaccacctttttacttgccatcttttgaagttcaaaatcttcctgttccttattaaaattagtttccataattatttttagatttgctggttctttctttttccaaaatttctttgattttcttctcctcccagtctttactgaaaaatggcgggatatcaaacactgtcagtccatgaatgactactcctactccccaacccaaaacacaccagacaaaccacaaatattcgggcgaggttataagatttacggctatcacaataatgtttaccagtataaaaaccgccaggtgctcgtaaaactctctaatttcttttacttttttcttggcctgataaaaacgttctgcttcaataaaatccttttccatggctacttccagtttttttgtttgttttcccgttccagaatctctcttatttttcgttcttcccaatctgagctgtacccaaataccttaaaagcatgcatgacaaccccaaacccccagcctaaagccgagaaccaaaaccactgaaatccaggagaatacctcaaatttataaaaattaaaaatggtatcacacaacaatatgaaattacgttaccgtaaaaaccttttagttcctctactcttttcttagctctgaaataagctttattttcgtcgctgtattctgcacttgtttccatgactgtaatttgtttggttaaaattggaattttaacggtgaaattttcttcgttttgttcaatcagaacttttctgttagttacaattgaatatcggttcacaatgttctgcaatcctactccctgcctgtcctgcaaaacttctttcttctgaaaatcattttgtatcgccagataatctccctctacaaaaatcctgatatgcaaaggtttttgctcgctaacgatattgtgttttactgtattctctaataaaagctgcaaggatagcggaactacttttgcatcgggattgatattgctcgttggtaattcataaaacaaactgttctcgaatcgcattttaagcaaattcatataggttttagcaaacgacagttcatcttcaacagaaaccagctccttgtctttttgctctaaaacgtagcgatagattttagataaagaggtcgtaaatcgttgtgcattatccggattttcttcgattaaagaactaagaacgtttaaactgttaaaaagaaaatgagggtctatttgattttttaaactttcgaattttgcattggccgttcctgcaataatcttttgctgtgttacttcaaatttggatgcctgtttccacttcaccataaagcttcgggcctgcatgaaagttgatactccgagagacagaatcacataaaagaggtgtgcccaaatcattctttcactaaaaaactgatccggcggaaggtcctgaacaaatacacaaacaacataattgattcccaaaacaaccggaacggtatacaatatggtaatcaaaattccgtagtacacccttagattggtttgttccagccaatcccattttttatctaaaagaacgttaataaatccgttaccaaagcccaatccaaaagagtaaaggcagcttatcccgaaggttagtaatacattttcaatatttaaatcggtaccaagaaaggcacagaataaaatggtaaagaccatagaaatcttgaaacacataagagttccacttttcaaatcagcaaatgagtttctatgatctttcattctattctgttggtattaaatttattttttacaattcttttgtgtttccaaagctctttctagtccccattttggagaaaaaggtgtcgctggtttaaaagtagcaaaaagttcgacagctttatccacttgtgcacataacggtttggtatcaacccctgaccattttgctcctccaatctgataatccgcttcaccaaaaacaattctcggattattcgggtctatcgcttttccttttgcataagcttccatcaccttagccgaatatttcattccgtttgtcattggatcagctactacccaggctgtatagattaaagcctgcatcgcataaagctcggcattattttgatctttaataaattctgtatccagtgcatcttgcgctttcgtcagcaacaaatcgattttcgttttatctttttcagaaaatgctgctgtagtattgattaaggctacatagtaatttggcaaataactgtttttttctgctgcagcaattctctcaaacatagccgaagcttccgtattttttccttctttccaaagcccgaaagcttttcccattccttgttcaaattgtgtttgtgccgaagttagcaatacggtaaataatgcgattgtggtaataattcttttcattttgatagtgttaaattggttactgtttttagttttagatgttttaaaatacgatgttaacttttgaatcgttgtttacgctaaatttagcatcgttatagattggaggtcccataaatcctttggcattattcgaacaggcataatcttcagaaggaattcccatcatattgcggtccagttttccgttgctgttttcgtcatgataagtcgagattccgtattctcctttgggaaccccaacaaaagttaccgtagcttcattatttttaatttcggaaactatgcttttgtaagtcgttttaagaaatgttgtatcggaattgtacaaacctactctaacagttcctttattgtttttcaaacctgaaacagcaactgtaaggtttacattctgcgcagataacaaactgcagataaacagcataagtaaagtgataattttgaccatgatttctttttttaaggttctaaatgactaaaactctgattttttctgatgatgattaaaactctttttttttaggttcaaaggttcagtgtgacaaaaggctcaaaggttttgattttgtaattcttaacctctctctctattccttttaatttatacttcaaaagtatatcggattttattcttttaaaattaaatgataccgagttgttgattttgatgactgaattgtttttttttgaggtactaaggttctgagagactaaggtactaaggtttcttctaaatagctcagtgtcataagtatcttagtaccttagtctctcagaacctcagcaacttagagattcttcaactgattctcattcttattctgactaatggtccagaagaaaccaacgaagaaaaagcgatcggcggttggtatcacggcttgtctgttgtaaactccgttggtatcgggattccttgcataatcatatccaaaaacattttgagttcccaatacatttgaaacagagaaatacagaattttttgagtggttaacaaataagcccagttgaagctcaaactattatatgcttttgttcttccattcataaactgcgtctgatttggatcgttgtacggacgtccggagctgaaactgttagtaaaaccaatctgagatttccaatcggtaataaaatatttggttacgacagacagggtatgatgagccacaaaactaggagttaccatcgctggaaaattcttgtactgtctctctgaatcgatataagaataagaaatccagtactccaggtttttatgcagattgctgtctctccaaaacaaatccaatccttttgcataacccgaaccgttgttgttgaaaaccgaattatactgaatttctctcgtattgtattgtactaaattgctatagtctttatagtaggcctctgctctaaaagtttgccccggtttggtgaactgataatttaagatataatgtctcgctttttcactttcaaactgatggtatttggagtatttaatataatcaactactggtgtctgcgtaaaatctccgtaagcaaatgaaaactgactggtttttgaaattttataagccagagaagctcttggtgcaatgttggtttcgttcagcaaactgttatttgaaagtcggaaacctacttttgcagccagttttttcgagaatagaatatctccttcggtgtaaaaagcggcaatattagaatcatagccatttgccgtttttatagtattattatccgtaaaattttcattaaactttgtgatgaaataatcggctccaaatgacaacttgaaataattcgagatgttttttctcaattttaattttagctgtgctgcattttcattgttgtctacatcattaatatcaaacttgattttgtttttgctgtatccgtaactaactcctgatgtgagctgccagcctgttccaaaatctcctttataagaggcattcagataaaagttattgttgtccagatccgttcggataggattagcgaaattgacatttttctgattcaaatcgaatttctctgcatcaaaagcagcgtagaatttaaaaattcctctctcaaaattatagcgatatacagcttcccctcccaaagactgatacggattattccaatctacgttttgcggaattacagcctggtaaggtgccagattaatataattggtattgatactgaacgagctttttttccatttttgagtattccctactcctaaacccacagtcattaaagcaatatccgttttattctgatccggttcatcctgagtgtttaacaacaaaacacttgataaagcttcaccatattctgcggaatatcctccggttgaaaacgcaattccgctaaacaaaaatggagagaatcggcttcgggtgggtaaattattagtcgttgcgccataaggctgtgctacacgaagtccgtctacaaaagtttgtgtttcgcttgcctcccctccacgaacaaataaacgtccatcttcgccaacactttgtgttcccggtaaagtttgtaaagctgcaataatgtttcccgctgatccggcagtagtcacaatatccagaggttttaaaactgaaactcttgctttatcacctgattctaatgttcctgcagtaataacaacggcgtcaagtgcatttacattctctctcagtttcactgtttgatctttataattggcaacatctatttcctgtttgaaagtttcgaaaagcaaaaaactcactaccaaaaatttatttcctttttcactggtttcgaatgaaaaactaccgtcttcagcacttgtcgctccgtcataagttccgtctatgtaaatattagcgccctgaaccggctttcctttttgatcaaccacttttcctgaaatcgtattctgggcaaaagtaaaaatggtaaagaataataaaataaaagtaattttggttttcatgattttggtttttgatagagcaaatgtattttaacatttcctgttaaaaaatattaaataacccaattgtagaattttaaggatgagttgtaaatatctaatttgtatcttagctatgaattctaaaatcttcacttatgtcagaaagcaaaagaatttcaaatctgtatcaatccatttataatggtgatccatggctggaagttaacttaaccaaaactttagaaaatataactgccgcacaggcctaccggaagataaatcctaacttaaataccatttgggaaattaccaaccatttgatccaatggaggagaaacattctaaaccgtatgcagggagagaccgtaataacgccggatcacaactattttgtgcctgtattggatccatcagaagcggcctgggagcagtcacttcaaagtctggcaaaatcacaggaagcctggagtactttctttcaggattttgatgatgccgatttggctaaaatatatgtgaataatggtcatacttattacgaacatcttcatggaattattcaacatgatgtgtatcatttaggacaaattgttatcttgaaaaaacttctttaaaaattttataatgattgatgaaaaattagattaccgatggcagaaaattaaaaatggaaaaccttttcttgctattatgaatcttgaaatcagtaaaaacgataatcaaaatgaaatcatagaagaatacgacggtaaaggctgggtcggaatgggcaattttgtaagcatcccagctaaagatgaacctggtaaagcacattttagaaattggagaaaagcagttatcaagggcctcgaatttgttttttctaaaactgatacgaaatggactgttaagataaaaaaagtagaaggactaattgctacagacacaaatcctacaattgtaggctatgccgctatattagctttttgcagacaaactaatctggaactggattttgataccagccgcaaaattgaagatttcaccttcaaaagctgggaagttaaaaatagtgatataaaaattccaaattttacagatttgaaatatgaagatgatgatttcaatgaataacgtctcaaagacttcacaatattttactgcaactttaaaattttctctcatgaaaaaaaatctctttttactcacattctttatagttaatactatcgctctttctcaggaatcagaaactaaattcgatgaaaaactagctaaatctctgaatgccgacgaatatggaatgaaaaaatatgtcttctgccttttaaaatccggaagcaacaccaccgcatccaaagaagaaagcaagaaactgtttgaaggtcatatggagaatatcggaaaattagccaaagaaggaaaactggttgttgccggtccttttatgaaaaacgaccgaaattatcgcggcatctacatttttaatgttgaaaccatagaggaagcaaaagcattggtagctacagatcctgccataaaagccaatctgcttgaagccgaattaaccccttggtacgccacagcagctttgcaggaaaccttaaaaatacacgacaaaattgccaagaaaaaaatataaaaacactttatgaaaaccgaaaaggaaaaaatgattgccggagaatattatctggcaggtgaccctattttagtaaaagaacgccgaaaagccaaaaacttactgcaccgcttaaacgtcaccgaataccgaatgaccaaaaaagccaaggaaattttagcagaattgattccgaatgcaggcaagagtttttatatagaacctccttttcattgtgactacggttacaatatttcctgtggcgacaacgtttattttaatgtaaactgtgttgttttggactgtgctccggtcaatattggatcaaatgtgttctttgcgccaaacgttcaaatttataccgccacccatccgcttgacgctgaactcagaaaaacactcgaaaatgccttactcatttctatcggagacgattgctggattggcggaaatacggtaatctgtccggggatcaccatcggaaaaggttgtgtgattggtgcaggatcagtagtgaccaaagatattcccgacaactcactggccgttggaaatccggcaaaaattattcgaaaattaaatcaggaaccccaataattaaacaatgcttaccttaaataaagttcaccatattgccattttatgctcggattatcaaaaatctaaaacattctataccgaagttttgggacttaccattattcgagaaatctatcgcgaggagcgtcaatcctataaactcgatttggctctgaatggtatttatgttgtcgaattgttttcgtttcctaatcctcctaaaaggccttcaagacctgaagctgtcggcttgcgtcatttggcttttgaagtcattaacttagaggaaaccatcgcttttttaaacactaaaaacatcgaatcagaacctatccgaatcgatgaattcactgaaaagcgattcacttttattgccgatcctgacgaattgcctattgaattttatgaaagataagatgaaaacgaacagaaaacattttctttcactgataactttaacacaatatagggagcgatttgtattaaaaaccgaatttgattaactaattttgtaatccgcataaaaaattgcgatttcaaaatcgatctctgatgaacaaaacggcgaaaatcaaaaaaaatcatcaatttattgtcctcaaaaaattagttattgtttccgtgttaattggctttctttctgcctttttaggaatctcactcaaaaaaatcaccgaatattacgaagaaattttctttcatgaagtctccgtaaatcctgttttttatatcctcttccctgtttttggattatccgttatttactttctcagacaatatctctttaagaaaaaagaaaacaagggcattaaagaggttttcgaaagcaccaaatcctcttccaaaaacttgccttcttataaaattccgtcccacttcatcaacggattactgacggttatctttggaggctctaccggaattgaggtttcaaccgtagtagccaccgccaccattggctctgttgcacaacaaaaagaaaatgtctttcgccaatacaagaccgaactaatatgtgcaggagttgcagcaggagtaaccgctttattcagcagtccgattgcgggaattttatttgctttagaagtaatctccagaaaagtaacacgcgcttttattatttccaatattattgccgtttccattgcttttggtttacttactatcttgaaagaagagccgctatttgccgtatctattaccacctggcatttaaaagccattccttacttcattcttttaggaattctggccggagtaaattctgtttatctgacccgttgcgttttattttttaaatctcaattctcacgaatcgatacgcattattataaaattttaattggttcagtggttttaagtatttctctttttattttccctcaattgtatggagaaggatatcacgctataaaaggaatattcaccactacttctgaaattccattaacactgactttatcactaacctttattggtatattaattctaaaaccaatcgttacctcaatcacattggcttccggaggcgatggcggtgtatttgctccaagcttgttcattggtgcttttttaggattactattggcctctgtattgaataccttttttcatgtacacgtaattccggtaaactttatgattattggtatggcagctgtattaagcgccagcatccacgctccttttacagcaatattcttagtctgtggcttaaccaacgattatactctatttctgcctattctcgtagtttgcctgatttctaaatataccgcaaaaatgatatatccttacactgtatattcttattctcccagcatttcaaaataatacatcatgcccgttcccaacataaaaagaggttaccgcaaaacacgttatatcctttacaaagaaactttaattgactacaaagagcatttttggtcatttctgggatcttttgtcggaattggaattttggcttatctggagtcgatacattttggaggaagtgaccttgtgtatcttattggttcatttggcgcttcaagtgttttgatttacggaatcatacaaagtccgttttcacaaccccgaaatttaattggcggtcatttgatttcagcaattattggggtttctgtaaataaattagttccggatattgtctggatcgcggcacctttggcggtatctctttctattattttcatgcagattaccaaaacacttcacccacccggaggagccactgcgcttatcgctgtcaccgcttccccgcaaataaaaaatctagggtatatgtatgtgctgtctcctgtgttagttggagtgttgattttatttgtgaccgctttgattttcaacaacatgacttccagcagaatttacccaagtcatagcacctaccacaaacactaccataagattagaaaacgtctgagtagaaagggataataagagttgccaatctttctcttaaaggaaagaaaaatattttcaacaattcgtaaatcaaaattcgtaaatcgttaattatactttacctttgccctttcaataaaaacaacgattatggtttataaatttagagtaattctagacgccgaagaagatatttttagagacattgctattcttgaagacgatactcttgaggatttacacaatgctatcttcaacgcttttggttttgacggaatggaagtggcttcgttttatacttgtgatgaaacctggaatcaggaagatgaaattccactttttgatactggtgacgttcccggtgagcaaagaacgatgggcgattatccgttatcttctattttagacgaacaaaataccaaaattatctatgtatatgatttcatcaatatgtggacattcttagttgaattagctgctattgaagatcaaatcgcaggagctccatatcctgaaacattattttcacatggagaaatgccggacgaagctacagaaaagaactttgaagccgacatgcacgacgatatctacggagaatttgaagatgatcttgatgaagatgatcttgacatgttcgaaggcgatgacagctttgaagattacggatttgaggagaattggaattagtgtaagttactaaggttctgagatgctaaggttctaagttttttactttgaaagttttttcttatttttaatttttcaaattaaaaatattttcatgagtaattttaaaaatctgcttatctggcaaaaatcaatggctctcactaccaaaatttatttttcaacaaaacattttccaaaagaagaaatcttcggattgacttcacaaattagacgttgctctatctctatccccagcaatattgcagagggatttggaagagaaagtgacaaagatcttttacgttttttgagtatttccgttgggtcattgtttgaaatgcaaacccaacttgaaattgcaaaaaacatatcttatttaaaagaagacgattttaacaatctatacgaggacagtcgcgaagtagaacggatgttagtttcttttataaaaaaaataaaacaaagaaactaaaccttagtaacttagcatctaagaacctcagcacctaaaaaaatatgatcaacttattcaacacccacatcgatacgctttcgatacaccgcgtagggaacaaaagcagaaacgaagcgatttttttatcggaacaaccatttaatttaaatgatgaaattgttcctttgatcaaagagtacttttttaagcctttcagagagaaagaggaaaactattatcagtttgcgcacgaagttgatttagactacaacgacatgtttaaatatgctacagaaatttttagcaaccctggaaatttacacgaggtttcaaaaaaaattactacgcatttatttgagcaatccaatcacccgcatattaaaaatggagaggtttacatcacttatcttaccaatctaagtatcgacaataatgttgtggatgctattggaatttttaaaagcgagttacaagccgactttttgcaatttgaagagaaaggaagcaatcttgaaatggtcctgcaacaaggaatcaacttaagtaaattagataaaggatgtttgatttttaactataaaaaagaagaaggatacaaaatcctaaccgttgacagcaaccgttatgacgcgcgctactggttagagcactttttatctgttgatgcttttgaagatgaaaacttcatcactaaaaaatacttaaaattctgccagaacttcgccaaagatgtcgttttaccggcagaagacaaaaaagaagaagtaatgttcatgaaccgatctgtgaattatttcgcaaaaaacgatcagtttgaagaacaaaatttcttaaacgaagtattagacaatcctgaattaattcctgaattcaaaaactataaagtggataaaggagaaaaatacagcatcgaagatgtaacctcattccctattgccaacgcagcagtttcagacgccagaaaatcgatcaaaaacgtgattaacctggacacacacattcagatcaaaatggattttatcaatccggaaagtgctgaaaaatttgttgaaaaaggctgggatgaagaaaaacaaatgtattactacttagtgtatttcaataaagaagagaaaagctaagagtcattcattttctattacttacttaaaataaaaaacggcaactacactagtaattgccgtttttttatactttatttcaaagtcacaatactgaaaacatcgctttcagaatatcatcgtaaaccttcttatcgttctctccggagcgagccaacaccctgattccggtataattattaaagataaaacgagccagcattcttgcttctaattgcgttgaaatttgtcctgcctgctgtcctttttttactgctgtcaaaaaaatctcctccactgtttgtcggttatcgctcacaattttagcaatctcttcgtcatgcatcgcgagttcaacagcagcatttactacaaaacacccctttgtcattcggtcatccagactttcaataaccgcctgtttaaaaatctcagttaagctttcttttatatcttctgattggttcaaaaggtttcttgtggcttcctgcccatgttccagataccttcttaaagcttttgaaaaaagtttctgtttgtctccaaaagtatcatacaaactcgaacgacttaaccccaaatgcgttaccagatcctgtgccgaagtaccgttatatcctttacaccaaaaaatttctatcgctttatccagagccttatcctcatcaaattcttttgttctggccataacttcataattaaattctcttacaaagatacgaaaaattacggaacgattgttccgcaattagagcgaaaaattaaaccactgtgtttactgtaagcccaccgtctaccacaatttcggttcctgtaataaacgaagcatcgtctgaggcaagaaaagttactgtcttagcaatctcggaagctttaccaaaacgtttcaataaaattttatcgcttaacgctgcaccaaatccttcgatttctgctttttctaatcctaattttccaaaaataggcgtttcaataggccccggtgaaatcgcattaattctgatatttctgggtgccagttctgttgcaaaaacacggttcaaagataacagagctgctttacttgccgcataaactcctgaattctccataccaacattggcatttatcgaggtattaaaaataacagaacctccatcgtttaaaataggcagcaacttttgaagtgtaaaataaactcccttaacgttcacatccataatcgaatcataatgactttctgaagcagattccaagggagcaaaagaagcgattccggcatttaaaaacacgatatcaattttaccaaattggtctttcacttcggcaactaaaccgtcaattgattttaaatcggattggtccgatgcaattccggttactttcaattcagcttctgcttttcctaaggcttctttgtttcttcccgtcacaattacttttgcaccatttgctgccaaatccgctgcagccgcataccctattccactattacctcctgttacaatggctactttattctctaattttttcattttaattgtttttaaattactgattctttgattattctgacacaaagatatcattacggaacgatcgttccgtaattaatcgagttaatattttgttaaataaaaagacttgcttttaaccctgctgtttatcagcttttgctctatgctatcataaaggaaagaaatgatgaaatgctaaaaattcttaatttatgcttaaatttacagtctaaaccaattcagatggatattcatttatacaacgaaagtcctttcgaaacgatcatctcctttcataagcttattgaatcttttgagaaaattgctttgtcggatgttgattacagggctaactacgcaaaagccattctaaaacaaatagaggcccttccggaacttcgaaccggaattaaggactacgccaccattaaagacaatgaagctttaatcaggaatcttttggctgatatcttcccaactgctttgacaaacaacgaaataaaagcggttaccataccttttcagaatttatatttcaactatacggaacgctttaaaaagatcttaagcaacgcaggatcagagtttgatatggaaattcgcgatttcgacgatcatcagttctatgtcaacaactgctgcattattttaggtgcctattacaaacagcgtatcgattttaacaacccttttttctatgacattcccgatgaaaatggaatagaaaagcactatcgtattctgtacaatgccgatttcatggaagttattccaacagaaaaatcaatagctttaactcaggatgatattgacttattactggacaactaccacgatcttgaactctggaaatcaaaattccctgccggaagctggattttaaaaggttttggaattgtttctttgttcgacgccaccacagaaagtgcgatttcaaacctgaaaagcaacttattaaaatctgattcaaaaacagctgctacagatgaaattgtattcaatatttttaaatcgatctttaaaattcctgatttaaaggtggggtttattgtatacagtccggaggaagaaaaatttatcagacctgttaaatttgacactcagatgcagagttttctactttcaaaagatcaggaaattgattgcaagaatgcttttttcggatgtaccttcgagaaattattaaacgataaagaacctttggtaatttctaacgtcgaaaaattcattgccgaatcacataatataaaattaggggagcatctgttaaaacaagggatccaaagttgtgtttttgctcctgtcataaaagacgggcagttactgggcgttgttgaactggtttcttctcaacaaaaagcactcaatacgattaatgctaccaaactggaactggtgcttccttatttaaccgatactattgatcgttacaatacggatatgcagcatcagattgaagccattattcaacgcgaatacaccaccattcaccctagtgtatattggaaattcaaaaaagaatcgcaaaactatttccaaaatatcaatcataccaaggattatatttttaaggaaattgtgtttaagaatgtatatccgctttacgggcaaattgacattaaaggctcttccgaacatcgaaatgaaacggttaagatcgaccttaaaaatcaattgactgctttgctgaaaattttcgaatctcagaatacaaaccacaatctggtccttttggaacagcgtaaatttgaactggaatcttttcgcgatgagctagacgctcctttaaaagcagataccgagcaatacattcagcgttatattgaagaagaaattcatcctcttttaaagaatacaaaagaaacacaaaaaagcgaaaaactggaacgagaatactttgagagtcttgacgcaaaaagcggattgttttatcaggagcgaaagaaatttgataatgcgatgtctattatcaacaaaaaactggcctcggttctggacaaaaaacaactcgaagcgcaacagatttatccacattattacgaacgatttaaaacagatggtgttgagcataacctctatattggggcctctattgctccaaatcaaccctttgatatgatgtacttgcacaacttgcgtttgtggcagttacaaaccttgtgcgaaatggaacttgaacatcatcagcttaaagaatcactcccgtacgaactggacgtgacttctttaatattagtgtttacttctccgctttcgatccgtttcagaatggatgaaaaacgttttgatgtcgacggaacctacaatgccagatacgaagtggtgaaaaaacgcatcgacaaatcgaatatcaaaggcacaaaagaccgtattacggagaaagagaaaattaccattgtgtattctcaaaacagtgaggaagctgaatatttaaaatacatcaaatacttacagcacaaaaaaattctcgaaccttccatcgaacaatttgaagttgaagaccttcagggagtttcgggtctaagagccattcgtgttaaagtaatcaataacaatacaaatcccgtagcgaaaaaaattacctatcaggacttattagatgagctcaactaatttttagttgagcttttatatggatttaaacgcaattacaaaagagattacggtaacaatgataccgatcataaaaagattgtaagcaatacgcagtaaattatatttgcgctgtaacaccaatcctaaataatacaaatcttttatcatggtagaatacagataatctttatccttcatcatttcgttcatcgcccagtcatattcttcaagaggcattttgtagaaatttccaaagaataataaattaattttcttggcttcgatatcctcacgtgtaaaaatgccggttgttacttttggtcgtgtagataaaatcgcaaaaataatggtcaccacacttgaaatcagcatgataaaagtgggaacaaccaaatgcgcgttcttcggactgtctaatttagggataatcgtagaaagtgcaatcgaaatgataatagcatttacagacaataaaatattcgctttactatcggcaattccgcttaaacgcgtatgattccccaaggtaacacgaaacaaggtgtcgataccacgatccggtttttcgattttatctctctttctattctcttcttcgattttttctgcctcttttttttcctgcttttcaatctttttctgaaccattaacagatttttctcttttaaaggctgccattttctaagcgcataatccgtataaaaacggtgcttgttcattagaaaattcagattttcttttgcccattcggcatttgaaaagtttaaattccaggtattctttaattcaatacgcaataattcgcaagtcgttgcatactcagtccccataaggtgagcaaaatcggcatccttgattattttctccaaatgtgttttcggagtatactcttttaccgtggccagaatcaaaccggaaacctgtgttatgaattcatccgacagtcctttttccttcaaaaaagccgtagcaattttcacactctcttcttcatgtttttcataaccattaatgtacccgctatcatgaaaccaggctgccactaaaagtacttccttctcctcagccgtaacatcttcctttttacaaagctcttttacagcatttacgaccgttaaagtatggttgaaattatgataagaatataaattagaaagtttatctttgagtaaattactaacaaaatcttcggattgttctattaaattcataaagaatatttttacaccactaaattatgaaattgtttttggataatcattttattgcgaaaattaaaacctgttctttggcaataactgtcttgctgctcacctattcctgtgcgactcataaagcccaatatggtaaaaatgtcagtgctaacgaaacggaaaacgcaacagataccctaaaaattgcacacactttttatttagtgggtgatgccggaaacgccgacgaagaaaaagcacagcaaactcttgaactactgcaccaaaagctaaaaaaagcgaataaaaaatcgaccttgctttttttaggagataatatctatccgaaaggttttcctgcccataatgaggggccggaaaaggctttggccgaaacgaaactgaccaatcaattaaaacttaccgaaggatttaagggaaaaacgattgtcattcccggaaaccacgattggtacaatggcatcaaaggccttgaacttcaggctgaatttgttactaaatatttaaacgataaaaaagcctttttaccccgaaaaagctgtgctatagaagctgttaaaatagacagtacaactgctttagtaacgattgacagtgaatggtttctggaagactggaacaaccaccctactataaatgacaattgtgatattaaaaccagagaagatttctttgacgaactggaaagtgttcttaataaaaatcaggagaaaacagtcattcttgccctacatcatccgctcatgagcaacggatcgcatggtggtcaatattcgttggaaaaacaactgttccctctggaacaaaaaattccgcttccggtaattggttcctttattaatttactgcgaaaaactacaggtgccagtccacaagacattcaaaacaaacaatatactgcttatgccaagcgcattaaaacgctgctgcaaaaacaaaaaaatgtgattgtagtttccggccacgatcataatctgcagtatgtaaacaaggaaaatattaagcagattattagcggtgcgggatcaaaatctgaagctgcaagggccattaattcaaatgatttctcttatggaggaaacggttacgctaccttaactttattcaaaagcggagatgcgaaagtttctttcttcggaaatgaaaacaaccacgagaagctactttttgagcaggaaatcataaaggccaaagagatcaactgggctgctgatattccgaataatttccctcctaaaattacgacttccatctattctcaaaaaatgacgcagaaaagtctgtttcataaatttcttttcggaaaccactatagaaaatattacagcttacctattgaggctaaaaccgcaactttagacaccttaatgggaggtctgaaacccattcgtgaaggtggcggacatcagtctaaatctttaagagtatctgaccctaaaggccgtgaatatgtaatgcgtgctatgaaaaaaagtgctacacaatttttacaatctgtagcttttaaagatcagtacattgttaatgattttgagaatacctatgcagagaatttcttattggacttttacactacttcacatccgtatactccctttgcagtaggcaatctggctgatagaatagggctggcacacagcaaccctattttatattacattccgaaacaaaatactttaaaggaattcaattcgaattttggagatgaattgtatatggttgaagaaagacctgccgacaatcatctggaagggaagaattttggaaatccaaccaatattatcagtacatctgacatgatgaaaaaccttcataaagatgaaaaatataccgttgacgaaaacgaatacataaaagcccgtttgtttgacatgcttattggcgattgggaccgacacgacgaccaatggcgttggggagaatataaaaaagacggaaaggtaacttacaaacctattcccagagatcgcgatcaggctttttcgaaatatgacggaactttgctttcactgttgatgaacattcctgcactgcgccacatgcgtacttttaaagacaaaatcgacaatgtaaaatggcttaacagagaaccttacccgcttgacttggcctttttaaaaactgccgaagaaaaagactggattgctcaggcaaaatacattcaggaaaacttaaccgatgctgacattgacaatgctttcaaaagcctgccaaaagaagttcaggatgaaacgattaaagacatacaacagaaattgaaaagccgaaaaaaagaacttcaaaaatatgcttcccaatactttgacgttttgagtcatactgtaatgatcgccggaacagataaaaaagacaagtttgtaattcgccatagcgccaaaaaaacactcgaaattcaggtattcagagttaaaaaagagggcgacgaattgatatacaataaaaccgttaccgatgctaaaacttccaacttatggatttacggtttagatgataatgatacttttcaggtaaccggcaatgcaaaatcgaagataaaaattcggttaattggcggacaaaacaatgatacgtataacattgagaacggaaaaagagtgatcgtttatgattttaaatcaaaacaaaacacctataatctggattcaaaaacgggaactcaactaacagacgattacgacgttaacctttacaattacgaaaaaccaaaatataatgtgatttcagggcttccgaatatggggtacaatcctgacgatggtgtaaagcttggttttaatctgaactataccgtaaacaatttcaaacaaaacccttacacacaaaaacatgtgttaaacggtttttactacttcgcaacggaaggttttgaattgaattacgccgcacattttccgggcttgcttggcaagtgggttattgatgttgaatcgcaatatacaactccaaattttacggtgaattatttcggatatgggaatgaaacaatcaataatacagagcaattcggaatggattacaaccgcgttcgcattcagaagtttaatgtttcagcggccatcagacatgtcgggcgatatggaagcgagtttagcatccagcccatgtttcaacaaatgagagtagaagaaactaaaaaccgatttattgatattccaaacatcattaatccggagatttttcaaagtcagacctttggtggtgcgaaaatcaagtaccatttcaaaaactccgactttgctgcaaaacctactttgggagttactttcatgatctcggcagcgtggttagccaatctaaatgaaaccaggcaaaactttccgactcttgaaagtcttttaggatttacgcataaaattgattctaacggaaagctggttttggccactcttttaaaaggaaaagcgatcctaaataacaattacgaattttatcagggtgcgtctttaggaggcgatacagacttacgcggttatcgaaacgaacgctttctgggaagttcttatttttctcaaagtactgatttacgtcttagcattggtaaaatccaaaaaacaattgctccgttaacctacggaatactgggtggttttgactatggaagaatctggcttgacggtgaaaattcccaaaaatggcatcaggattatggcggcggactttggctgaacgcgatcaatgtaataaccgcaagaatcacttatttcaaatctcctgacgaaacaggaagagtcatttttggagcggcttatagtttttaactagaggttctgagatgctgagttactaaggttctaaggttttttgccacgaattcacgaatgattttgtaatttaaaattcgtgaattcgtggcaaactttttattttaaaggtactgagttactgagattctaagatcctaagctttctttctcagtattcaaaaatgatacagtaaactaaaattcgcgaattcgtggcaaaaaaccttagagcctcagcacctcagtaccttagcccctttttattttagcttaaactcataaacattgcctcctgttttatttgccttttcatcggcaatcaataaagtagtgttgtctttaaaaacgatagcttctttttgcgaaaagtgatccaatttaatttccgtttgtgatcctttatggaacaaatcatttttataccctttaaacaaaacgattttatcatgactcagcaaagctacttttttaccatcagggctaatggttgcactggttaaaacacaatgattgtaattatcacaagtcttaaactcccctattttaatcgccttctgagttcccggagcatttaaaattttataaataaaggcagttccatcaaaattcttactacggtttttggtaaacagataaaaataattcccgtgctcaaaaaagccttcgacatcatagaacatttcctttttcttcggaggaaattccttttgttccgggtaagaaaatgaaaccttatactctgccactgctgaatctttattcaactgattcttattgactttataaatacacaaatctttgcgctcgttgtcgttatttccaaaatctccaatgtaaatattcccgcttttgtctttggtaatatcttcccaatctacattagttgcatttgaaacaacaatcgatctggcaatcttcccgtccgattttatcgcataaatttcatttttattaccactgtcttctatcgcataaattaaattcgtttcaggaaaataagtaattcccgaaacttcttttagcttcttcggaagggcgtacaacgtttttaaatttggattggattgttgctgacaagccagtaaggctatagaagccccgagtaaaaaaaattttttcataatatcttcttttaatatttaacctaactaaaacctgctaacaacccaacatctttatggagtgcagtatttaaggtaggtttgtatttttaaaattacgtgtaataaattcaaaagcggcaaacataatatgtcccatagatttggcatttttgaacttcatatcattggtataacggtacaattccatttttagttgattcagatgctcttctgtcgaaatcgtatcgtgacacatgatgttcagcagttttttgattctggtttcggcagaatggatacgtttcgccaaaatcgctctttcctcgtccttatactgaataattgaccggtcctccagtttttctttaatcaatttgatcatcggataattttctttgaaaaactgcggacgatacactttaaagttcccttcataacattgctgatcaaaatcaattggacggattttataaactacctgatcgaagtcatgaatgggaacaatcacataattgtaagcacgcatatcccccaaaagcctgatcatacagcgttcgttgaacttcacaaattcttttgcaatttgcgacttttccatttccgtacaactgtctaataaagtatccataaaaacgtcacccgggattccgataatatgctcttcaattaaagtatccttaaaaaccaaaaagttgattttatccggtgagagaatatcctccagctctaatccgtaaattcttgaagcatctgcttttttgatataaaaatgaacataattatcattgagaatattacgcacttttatccggaaaggtttagaatttccaaaagtacagtaatcaattgcatcaatattcaaatactgaatgatctcgttatttccatcagaatgcaaaagagaatagatttttttcagattcaaatcgatttcatttctctcaaactcgctgtaatacactctgatccataaagtatccgtttcatttttatcataaacgttaaccgaacctgaaaatcgcaatagatcatcatagaacaccgatactttcgaaatacgttcgtatcgctctaaataactaagaagagacggcattaaaggataggacggttttttcaaaaccattaaaggttcgctcatatttttgaatatctttagtacaaatttaaatgaatagcatcatataaataaatttagcgtaacaaaataaaagttgaatcgtcttacataaaactaaaaccgaaataaatttggaaaccatacttactatcgagaatcttcacaaaagatacgggcgtattcaggccttaaaaaatgtatcttttgaaatacaaaaaggccacgtttatggcatattaggccctaacggaagcggtaaatcgactactttaggaattgtactgaatgttgtgaacagaacttcgggaaactatacctggtttggaggaaaggtacaaacacatgaagcactaaaaaaagtaggcgccatcatcgaaagacccaacttttacccgtacatgactgccgaagaaaacctgaaactggtttgcaaaataaaaagcatcaattattctaagatcagtgaaaaacttgatttagttgggctatccgagagaaaagacagcaagttcagcaccttttctttgggaatgaaacagcgtctggctattgcttcggcactcttaaatgatccggaaattttaattttagacgaaccaacaaatggtttagatccacagggaattcatcagatcagagacattattcgaaaaattgcgtcacaaggaaccactattttactggcctctcatcttttggacgaagtagaaaaagtatgttcgcatgtagttgttttacgtaaaggagaaattttatactctggttcagtagacggaatgtcagccaatgaaggtttctttgaacttcagtctgatgataatctggcgttgaaaaccatactggaaacacatccggcagttgaaaaaatcaccgaagaagacgggaaaatcctggtttatttacactctgatttatccgcttcagaactcaatcattttctgttttctaaaaatatcgctttgagccatctggtaaaacgcaaaaacagtttagaagcgcaatttttagaattaaccaagaacgccattatccaaaacaactaaaccatgaacagactaatttctatagaactacaaaaaatctggaaaaacaaagccagccgcatcctcactttaacttatttcatactgctttcgtttatcgctttaatggcttcgatcaaatttgacataggtccatttaaattccatttggcagaaatgggtattttcaacttccctttcatttggcatttcaattcttatgtagccgccttacttaaacttttcctcgcaatcgttattgtttctatgatggccaatgaatacagttacggaactttaaaacaaaacctgattgacggtttaagcaaaaaagaattcgttctgtccaagttcctgacagtcgtactgtttgcattagcctctacccttttcgtatttgtcatgagcttaattcttggactgtgcttttcatcctataccgaatttgatgtgattatgatggatttagactatcttcttgcctttttcgtaaaactcactggcttctttgcattctgtttatttttgggaattttggtaaaacgttcggcttttgccttgggttttcttttggtatggagtataacagaaggaattgtgaaaggaattttaatctttaaaattttccctgaaagttcagtaggccagacaataatgatttttttcccgttggaagctatgtcaaatctaatcattgagcctttttcaagattatcagtaattcgttcaataggcacacaaattggggtagaaaataccaaagattatgatgtacactatacctcggttataatcgttttgatctggaccttcttatttgtttacttctcatacaagctattaaaaaagagggatttgtagtatatttgctgtactatgaactattttaaaatcttatcactagtctattttgtgtgtttgctctctataaaagtaaacgcacaaaatattagtgtagacgataccagaacccctgaagatttagcaaaaaatattttaatcaacagcgcttgtatcaatgttagcagtgttaatgcaaccggaaaccctgccaatactggtaaaagttatgcttactttaattcaggtggaggtagttttcccttttcaggaggtattgttttaagtacatcaccaagttcaaatgcttcaggtccatttataagatcaaactctataggcattacaaacgataagtggctgggtgactcagacttaaatcaggccttaaacaataacaggagtaaacaggcaactgtgctcgaatttgattttattgctttagccaactccatcagctttaattatatttttgcttcaaacgaatatcaaacatactatccctgcatctattctgatggttttgcttttttaataaaagaagcaggcactagcgatccttataaaaatttagccgtcttacccaatacaacaaccccggtttcttctacaaccgttcatactaaaatcgaacccgtttttgccaatggtaccaatcatcagggatgtgaccctttaaatgaaagttttttcaatggctacaacaccactaatagccccataaattatgctggacaaactgtagttatgaatgcttatacagatgtaattcccaacaaaaaataccatttaaaactggtaattgctgacgatccgaccgggcaatacaactcggctgtttttatagaagcaggtagttttgtctctagaataaatcttggaaataacaggacaattgccgataaaaatccggcctgttttggagaaagtatcgtcttagatacacagctcgacagcaatctttacacttttaaatggtttaaagaaactaccactaataactatgtagaaatttctccggcagaaaccggttctgcttatactgtaaatacgacagggaattacaaagttgaagccacactaataggaacaacttgtgttgccaccggaaaaagtaaaattgagtttgctcctgaaattctgtccactaataccacattagtacaatgtgatgatgacaccgacagaatatcaatcttcgaccttacaaaggccgctaatattgttaaaaacaatgttgctgaaacgctgatcaaaggatactacgaatcactagctgatgctcaaactaaaacgaatccaatctcaactcctgaaaagtacactaataaatccccaaatcaggtcatttacgtccgacttgaaaaccaatacggctgtagtaaaactgtagaagtgacgttgcaaatttccaacaccacaattgcccctcaaaatccatttgcaacttgcgacggagatgacaaacaagatggattttatcaatttgatcttaatacacaggtaacccctcaactttcgacaggtttacctccgggcatcactttcagttactttttaaatgcaaatgatgctctgacagctacaaatacattacctaatatctttaaaaacactaccgcttttacccaaaccatttatgctaaagccacaaatgggcccgattgttacgacattcttcccataactcttgttgtaaatacttttgatcccgctaattttcaagacgaatcaaaatacctgtgtaaaggggagcagattactctggatgtcgccactggttttgccagctattcatggaataccggcgcttcctcaagctccattactgtaaacacagtaggtgattattcagtactcgtacaagatactaacggctgtgaaaaaaccaaaaaattcaaagtaatactctccgaacctgcacttataaccagtgcagacacaaaagatttctctggtgatgaaaattctgttttaattcaatacacaggagttggtaattatgaattttcattggatggaagtgtttttcaggatactccattattcactaatgtcaaacccggggtttacaatactatcgcaagagataaaaatggctgcggaatatcgaaccaatataaagtttacatagcagactatccgagatttttcactccaaacggagatggttataatgatttatggctaattaaaaactccgaccagcttccggcttttaaaatcttcatttttgaccgttacggaaaattactcaaacaaatggatcaaaatactctgggctggaatggccagtttaacaaccagcaattgccttcagatgactattggttcaaccttcaatttgttaacggcagagtcataaaaggtcacttcagcttaaaaagataaaaacttagcacttcttattccggaaatctgcaaagcaattcctgttcgaaaattccaagacaaaaaaaaagccaaatcccactaattggaatttggctttttatattgaattttaaactccttagaatttaaatctttttctatcagtttctgtcaaatagatttttctcaaacgaatagattttggagtaacctctacatattcatctttttgaatgtactctaatgcttcctctaaagagaaaatgattggaggaataattctcgctttatcatctgctccggaagaacgaacgttagattgttttttctctttcgttacgttaacacacatatcatcactacgagagttttctccaattacctgaccttcgtaaatttcggcatttggttcaacaaaaaacttaccacgatcttgtaatttatcaatagaataaggaatagcttttcctttttccatagaaattaacgaacctttgttacgtccggcaatttctcctttataaggctcatatccaatgaaacggtgtgccataatagcctcaccagctgttgcagtaagcaattggttacgcaatccaataattccacgtgatggaatattaaatttaacaatcatacgttcccctttagtttccatactcaacatttcacctttacgcatggtaacaaactctaccgctctacctgaaagattctctggcaaatcgattgttaattcctcaattggctcacattttttaccatcaatttctttgatgataacttgtggctgaccaatttgcaactcatacccttctcttctcattgtttcaataagaacagataagtgaagtactccacgaccaaaaaccatgaatttatcagcagaatcagtttcacctaacttcatcgcaaggtttttctctaattcttttgtcaatctttctctaatgtgacgagaagttacaaatttaccttctttaccaaagaaaggagagtcattaatagtaaacaacatactcattgttggctcatcaatagcaatagatgctaaaccttcaggattttcaaaatcagaaatagtatcaccaatttcgaaaccttcaacaccaacaatagcacaaatatctcctgcaattacttctgttacttttttacgtccaagaccttcaaaagtatgtaattccttaattctcgattttgttacggcaccatctctttttaccaaagaaattggcattccttcttttaagatacctctttctaaacgaccgatagcaatacgtcctgtaaaagcagagaaatctaaagatgtaatcaacatttgaggatttccttctgaaactttaggagcaggtacattatcaaccaccatatccaataatgcttcaacattatccgttacgttttcccagtggtcagacatccagttgtttttagcagaaccataaacggttggaaaatccaactgccattcttcagcacctaattcaaacattaagtcaaaaactttttcatgaacttcttcaggagtacagttttctttgtccactttattgataactacgcaaggcttaagacctaagtcaatcgctttttgtaatacgaaacgagtttgtggcattgggccttcaaaagcatccactagcaaacatacaccatcggccatgttcaatacacgttctacttcacctccaaaatccgcgtggccaggagtgtcaataatattgatttttgttcctttatattgaactgatacgttctttgaagtaatagtaatacctctctcacgctctaaatcgttattatcaagaattaaatcacctgtgttttcgttgtcacgaaataattgacagtgatacataattttatcaaccaaagtggttttaccgtgatcgacgtgggcaataattgcaatgtttctaatagattccatctgtgatttttaatgggtgcaaaggtacactttattttgatataaaaaacgtttctgcgatagtttgcgtagagacaagtaattagtcacccaaaaacaatgtaaatttaagtctaatttgaacttttgttattgtttaattatagttaatttaactatatttgagtgatgaaaagtaaaactctccaaattactctagtttatattatcatatcgttatttgtggcaatcatctgtcataaattacttacgacttacttttcaaagaccgattactacactgttttttttttaaaggacatttttttcatccttagcactgcactgtttttcagatacatactttctaaaaacgagaaaaaaaacattactattttcaaaaaattaaaggaaacaaacgaagaaataaaggaatcaaacgaaaaatatgacattgtagccaaagcaacaagcgacaccatttgggattggaaaatccaagaagacagcatcaattggaacaaaggaatagaaaacgtttttgggtacaatccggcagaagttggtaaaacatccaaatggtggtttgacaagattcacccggaagatagcatcagaatgtctatcaaactatactcttttatagaacaaaaaacagaaaaatggcaggatcagtatcgttttaaatgtgccaatggaagttacaaatatgttctggacagaggttttctactcaaagatgaaaacggaagagccatcagaatgattggagccatccaggacatcaccaaacaaaaggaagaagagcagcgtttaagacttttagaaactgtaattacacaatctaaagattccatattaataacagaagccaattctccagatcgaaaaatacctaaaattgtttacgttaaccctgctttttcacaaatgtcaggatacatgtcaaatgaaataattggaaaatcacccaacatcttcaaaggcccaaaatccgattcagaagaattaaaaaaactcttaagagctataaaaaacgaagaagagtgcctaattgaaaccataacctatactaaatcaaaagaagaatactgggtaagattctccatgatccctattttcaataccgaaggtattatttcacactggatctccattcaaagagacattaccgatgaaaagaaactagagacagaaaaagaacacttaattagagaattaactcaaaacaacaaagacttaaaacaattctcctacatcacctcacacaatttacgtgcaccactatccaatttaatcggactattaaaccttattgaggacatacctgtcgaaaacgaagaactcgaagaaatcttgtccggttttacgaaatcaacacatttgctaaacgaaaccattaacgacttagtaaaagtaatcatcatcaaagacaacccttctatgcaaaaagaagaagtctccctacaagaagtttttgaaaatgtatttagccagctatcgtttcaaatcgaactacacaaacccattatcaaactcaaattcgataaagtcccattgctaaacacaaacaaagcttatatcgagagcattttactaaacctacttaccaattccatcaaatacaaatcagaaaacagaaaactaaaaatatcgattacagcagaacaagtcgaccaaaaagcagttctaactttcaaagacaacggaattgggattgatttagaaagaaaccgcgacaaagtctttggactgtaccaacgattccacaactaccccgacagtaaaggactgggactatatcttgtaaaatcgcaagtcgaaactatgggaggaaccatcagtgttgatagtgaagtcaacaaaggcaccacatttacaataacattcaaaaactaactcatatgctggagcaaattttatgtatagacgatgatcctatcacgttgatgttatgcaaaaaagtaatttcgaaatcatcattctccaaagaaatcatcacagctcagaatggcgaggaagcattacaccatttcaacacacttaaatataccaacaacaaaaacaaagcaaacaaaaaaccggaactgatttttttagatctaaacatgcccgtaatgggcggttgggaattcctggatcattttacctctccggcttacaaagaattcaataccgcaaatgtaattgtcctctcctctactattgatcctgaagacttggccaaggctaaaaaataccccattataatcgatttcctttcaaaaccaatcactcttccaatgctggagtatcttaaaaagaaaatcggaatctaaccctggaattttaaattttaaatcctaaatcccaaaccacaatcaaatactattaaaccttaaaaagcatccgaataatacaaacaaaaaaaagtcctcaaaagaggactttttatatttttatcaaattgcaattaattacaatttagcaacatgtttagttaatttagacttcaagttagaagctttattatcatgaatgatgttctttttagctaatttatcaatcatagagataacagttgataatttagaagatgcatcagctttatcagtagctaatcttaacgctttaatagcattacgagtagttttatgctggtatctgttaagaactcttcttttttcgttacttctgattctttttaatgctgacttatgatttgccattttcttttaattttttagatgtaataattattataaatactagttaaaaaagaaaaacctcccacaattataaaacaatcactttggttttaactaataaaacaaaaatcgagacaccaatttttattttacaaaacttatttacaactaattttttgtagtctgtaagggaatcgaacccctgttaccaggacgaaagcctggagtcctaacccctagacgaacagaccatcatcgtactaagttttcttcaatttaaagaaattgaaatttgtagtccgtgggggaatcgaaccccccttaccaggatgaaaacctggcgtcctaaccgatagacgaacggaccattacatcaagttaaataactttgtcgcagaaaaaaaaagtagtccgtgggggaatcgaaccccccttaccaggatgaaaacctggcgtcctaaccgatagacgaacggaccgtgtgtttctctaatgcggatgcaaagatacatctattttttagttgcacaatagctgatgcaattttttttatttttttttaatatgccttagcaaaaagcactcttttagaagatggattcccagtaaacacacagcttcccgcttcttcaacagcatccaaaggaatacaacgaatcgttgcttttgtcaagtcttttatcttctcttcagtagctgcggtaccatcccaatgagccgatataaaaccaccttttccatctaaaatttctttaaattcctcaaagctatttacttccgtaatatgcgtatcacgatagttcaatgctctattgaataaatcgacctgaatctgctccaaaagatcatttacataattcacaattccgtcattagaaacaacctctttagtcaatgtatcacgtctggcaacttcaaaagttccattttccagatcttttggtccgaccgcgattctaactggtacccctttcaattcccattctgcaaacttaaacccaggcttctgagtcgttcggtcatcatatttaacagaaatcttcagctttcttagtttagccgtcaattcattaactgcagccgtaatttctgccaactgctcgtctgttttataaatcggaacaatcaccacctgtattggtgctaaatttggaggcaataccaatccctgatcatcagaatgcgtcataatcaacgctcccatcaaacgagtcgaaactccccatgaagttccccaaacatgctcttgttttccttcggcgttggcaaacttaacatcaaatgccttagcgaagttctgccctaaaaagtgagaagtccctgcctgcaatgcctttccgtcctgcatcaaagcttcaatacaatacgtttcatcagcacctgcaaaacgttctgtttcggttttaaaaccttttacaaccggaatcgccataaaattctgtgcaaaatcagcatacacatgcatcattttttcagattcctctaaagcttcagcttttgtagcatgagccgtatgcccttcctgccacaagaactcagcagttcttaaaaacaaacgtgtacgcatttcccaacgcaccacatttgcccattgattaattaacaaaggtaaatctctgtaagactgcacccagcctttataagtagaccaaataatagcctcacttgttggacgaacaataagctcctcctccaatttagcatttgggtctacaataagctttccgggtttatccggatcattctttaatctataatgcgttacaacagcgcactcttttgcaaatccttctgcatttttctcttccacttcaaacatgctcttaggcacaaataaaggaaaatatgcattctgatgtcctgtttctttaaacattcgatccaattccgcctgcattttttcccagatagcgtatccgtaaggtttaataaccatacatcctctaactcctgaattttcagctagatccgcttttacaaccagctcgttataccattttgaataatcttctgatcttgtagtgaggttcttactcatatcgaatagtttggcacaaattttgttttaataattttaactaaatagtttgacaaaactaactatttttgtaatgtgcaacaataaaaaacaccacagatatgaaaacttctatttctttccgccaaaactcaagtcatttttacttaattggattattgagttttctattagcatcgtgtggttcttaccaaaacacttcctaccatgacaacgatggaatttacggaggttcaccaagaacgtatgctcaagcaaataccacaaataatcaatataaagattactttagatccttacaagacgacaatcagccaacggaaatttttacagatgttgacagctatggcaattatgctgtaaatgacagcacaaaaaccgtaagcaactaccctgcctggggaagcgcaaccactgatgtttctgtaaatgtatattctaacccttcatggtcgttaggatttggctttggctacggatacccttactatggttggggttacggaggatactgggacaactattggggataccctggctactggggaggcggatggggatatccaggatggggatacccgggatggggttaccctggttattggggatctggtcaccgatatggatacaacaactactcttataactatggaagaagaggttctgccgcttattatggaggaagaaactattcttctggaagctatgccacaaacagaagctacaacaccaacagaacttacaactctaacagagactacaccagtactaaccgcagctataacagcaatagaacctacagcacaaacagaagtgatttctctgattcaagaagaaatgcgtctacaaacggaagaacctacaacaactcctcaccaaactttacaaacagaggaaactcaactcaatacaatagtactgattacagcaacagaagatcatcaagtaactacaacactaacagaagttacaactacaacaataacaattctgcaccaacaagaagctactctcctagcccatcccgttctatgaatagcagcggtggcggtggaggaagatcatatagcggcggcggtggcggcggtggaggaagatcatacagtggcggaggaggcggaagaagataatcgcctctttcgttaatcacaaaatcaaactaaaaactatccaaatgaaaaaaatattattcctacttattacaggactaactgccagcgtctcacattctcaggaagtatcagatgctgtacgttatgcacaagacaatttaaccggaactgcaagattcagagccatgagtggtgcttttggagccgttggaggagatttctccgctatttccgtaaaccctgcaggatcggcaatattctctaataatcaggttggagtaagttttagcaatcaaaacatcaaaaacaactccaactattttgaaacaggaattagcgaaagcaaaaattcttttacactcaatcaggcaggcgctgtttttgtttttcacgatcacaacccaaacaacaactggaaaaaaattacgattggagcctcttacgaaaacaccaataattttgacaacagaattgtttcagtaggaacaaacccaacaaattctattgacggttattttttatcttatgccaataacggaaacggaggcgcaccagtgccacaagaatttgtaaacctggcaaataacgaatcaatcagtgacctttatcgctatttaggttcgaacttaccaaatggtcaataccgaaatttatccggattctctgcacaacaagccatgctaggctaccagggattcgtcataaacgcttctgacccgaataacccgaacagcacttacaccacaaatgtacctgcaggaaataccccggggaaaggaaattattaccaagaaaatgaaattttcacgactggctacaatagtaaattgagtttcaacattgcaacttcttacaaagacagactttatttaggtgctaatctaaatgtacatatcacagattacagaagatctagtagtttctacgaagacaatgataacccaacacaagcaaccccaacgatatcaagtttacgcttcaacaacaacctttatacctacggaaatggcttctcttttcaacttggagccatcgccaaagtcactaaagaattccgacttggactagcttacgaatccaacacttggtacgaactttacgatgaactttcacaaagtttatacacaacattacaagcaaccggtggacaacctattaataaagcagttaatcctgatgtcgtaaatatttacgaacgctacaccttacaaacaccaggaaaaaccacttttagtgccgcttatgtatttggaaaatctggattaatcagtattgattatgcaattaaagactatagcaataccaaatacaaacctggccgtgattttacaggaatcaacaatcaactaagtaatcaactgaccaatgctggtgaattaagaataggcgccgaatacaaaataaaacaattgagtttacgtgggggatatcgttttgaagagagtccatacaaagacggaactacgattggagacttaagcagttactcaggtggtttaggttataattttggaggcactaaagtagatttagcctattcttatttagaaagaaaatcgaatcagggattttttgcaaccggattcacaaacggagcaaacgttacctcgaaactaaacaacgttacgcttactttattatttgaattgtaattaaaaataaatagaatgaattaaaatctccgtcaggctcttacttgacggattttttttgcccagatagaagcgacatccttttgtgtccaccgctgcgaacacaaaagatatagtaaacagcaggataagcttcataaaaatcacctaaaagaaaaggaaacaagcggtgtttgaataaaaaagtgtaattttgcactccaatttataaaagtatgagaaccaagtctttaaaaaagaacaaaattaacgtaatcactcttgggtgttcgaaaaatgtatatgacagtgaagtgctaatgggacaacttcgcgctaatggcaaagaagtacaacatgaggcacctgctaaggaagaaggaaacattattgtgatcaacacttgcggttttattgacaacgccaaagcagagtcggtaaacatgattttggaatatgctgataaaaaagacaaaggattagtagataaagttttcgttaccggatgtttgtctgaacgttacagaccggatttagaaaaggaaatcccaaatgtcgatcaatattttggtacaactgaattgcctcagctgcttaaagctcttggtgctgactataaacacgagctactgggagagcgtttgactacaactccaaagaattatgcttatttaaaaattgcggaaggctgcgacagaccttgcagtttttgtgccattccgttaatgagaggttcgcatgtttcgcaaccgatcgaaaaactagttaaagaggctcaaggtttagccaaaaatggtgtaaaagaattaattctaattgctcaggatttaacgtattacggcctagatctttataaaaaacgaaatcttgccgaacttctggaagcattagccaatgttgaaggtatcgaatggattcgtcttcattatgcttacccaacaggtttcccaatggatgttttagaattaatgaaacgtgagccaaaaatctgtaattacatcgatattccgctgcaacatatttctgattccattttaaaatcgatgcgtcgtggtactactcaggcgaaaacgacacaattattaaaagatttccgtgcagcagttccgggaatggcgatcagaacgactttaattgttggatatccgggcgaaactcaggaagattttgagattctgaaagattttgttcaggaaatgaaatttgacagaatgggatgttttgcctattctcacgaagaaaacacacatgcttatttattggaagataatgttccggacgatgtaaaacaggcccgtgcgaacgagatcatggaattacaatcgcaaatttcatgggacttaaatcaggaaaaagtaggacaggttttcaaatgtattattgatcgaaaagaaggggctcattttgtaggacgaactgaatttgacagtccggatgttgataacgaagttttgattgacgcttctaagcattatgtaaaaacaggagaatttgttaatataaggataatagaagcgacagaatttgatttatacggagaacctgcttaaatttacgctaaacaagtatcaattttagataaaatacacttttatgaaaccaatacaatctttatttattttgtttttcaccttattgtgttttaactctgtttcagctcaatacggaaatggatacaataacggttacggtggtggcggttatggtaatggctacggaagaggaggcggaatgggaatggacagaagcatgatgggtggaccacaacccaataccagtaaaccaaaagaggtacctgtagaggaaactgtcggtaaaattgtagaacaaatgaaacctgaagtaaatctcgacgaactgcaagttatcgctatttcaaatgttttagtagacagtatgagagaacaagggattttactaaaaaatgagagcagtagccaggatcaaaagatcgaacaaattaaagcattaagagaaagcaccacaaaaaagattaccgctttcttaaatccagatcagatccccaagtacactgcatttatggataattttaaagagatcaaaaagacctctaaatcaaaaaagaaaaaagattcaaaagatagagattcaaaagaagtaaaagaagactctgaaacgatcaaaactcaggattagtttttttcaacctcacctcaaaatacaaataccaccatggcaaaaaaactttttttttacctgatcttagcaattattattacttcttgctctacaaatccatataaaaacactgaaaaagtttacgatcagcagcttaaaactttagaaggccaaattaccagtaaagaagctcagccaattcctgtagtaccacgtatcgttattgatacgacttatgcacagcagcttggcattataaaagatactttatcaaaaaccggctctacttctttattaaacggcatacagacagaatggatcggaacagtaaactttaacttaagaaaaccaagttttattattattcaccatacggctcaggattcacttcaacagacgattaatacttttaccaaaacaagaactcaggtaagtgctcactatatcatatctgaaaacggaaaagtagttcaaatgctgaacgattacttgagagcatggcatgcaggagcatctacctgggggaaaaatacagatttaaattcttcttctatcggagtagagcttgacaacaacggttttaaaccttttaccgaggctcagatcagcagtttagtggcgctattaacgaaactaaagaaagattacaatattccaactcaaaacatattaggacattctgatattgctccgggaaggaaacaggacccaagtgccttattcccttggaaaactctggccgaaaaaggatttggaatctggtcagacgaaattctcgaggaagctccttttgattttaagattgaacaggcgctaaggattattggatacaataccaagaatctttcagcagctattatggcattcaaattacattacattcaaactgatgtaacaccaactttggatcgaaaaacaatagataccatttattcgatttataaaaaacagcttcagtaatttacacctgaaggttaaccgcaatgaacgctaagatttaaggcaagattcgtaaagttttttctcattttatatcatttcgaccgaaggaagaaatcgcacgcgggattcgacaaagattggcaacattctgtgtcgagtttctaatgcgatttctcccttcggtcgaaatgacaagctttttggttatttaatctcaaaagtataagcaaaactcacacacagaaagcttacccataactcacatctcctctaaaaaaataaaaaagctgccaaaacacaagtatgtttcgacagctccaaaaaaaaaaaaaaaatatcaatctttatctctagaaagagtatgttgtagctatcaatccgtagaatgatcctccggttggggcagcatctttatctaaaaaaatatcctcagaggcagcgtcgtatcttaactccggaataatagtcaatttccctactttataattcaaagaaacggtgtttgcaaaaacatttgatcctgttaatgttcctaaacttgccgctgctttttttgcatcgaaatactccattctataggccagactcaaatttggtttgaaagtataattggcataccctaccaaagcaaaccaatcaccatcgagcgcactgtcaatatcattattcgttttagcgtacgtggcattaaaccctaaagaaaagacatccgttattgttttagacgctacaaaatcaatctgtgttttattttcatcagaaaccggattagtacttcccgaagtaaaattcaaataagcactaccggtctctcctatataccctacttgtgctatgtatgttttttgacttgaacctgcatccattgctgatttaaagtcggtcggattggtaataccaagcatagctgtgaacttacctgatgtgtattgtgctttcagacctgtattgaaaaacggaccataagaaaaagcataagacatgctgtaatttttatttccgacagcatctaatacctcataacctatatgtgttccgaaactacccgctacaaacttaaatttatcagtaacctgataggtaaagaataattgtttaatcaaaaattttgcatttatgtctttatctgtagtttcgttataggagaactctcctgctctttttccaaagcccagatcaacaaagacagccgcttttccaaagctatgtcctgcctgaacagaagccattcctaattcgaatgaatcctgagaattggtaaaactcgtcaatccgttcatttgttttgaaaaatcatatttataataagcatctgccgatcctccccaagtggtcgccggtgaagtcgcagcttccttttcatcttgagcaaaagcaaaagaactggttaacatcacggctaaaatgtgtactacttttttcatgttttaattggttttggttattaattgattttggttagttaatcttttatataggcaattgaatactataagtcacttttaaaacctcttattccctctaaaacctcttcattttcagtagcgaatttattaacttttgcatgagtaaaagaattcaaatctacttttttggcatttttaagcaagaattacggattacaaaaattaacctcttcataatcgttatttgatattattagctgttcatttttaaaaaatacataacacataaataacaacaaactacacaaaataataggtttacataaaaaatcaaataaaaaataatacaaaaacatcaaaaaccaattcaacaaaaaaacacacccccttaaaaaataccacctaattcaaaacaacaaaaaatacaacaaaaaccactcaccactaaaaaggtaaaaaaaatcgatatcaaaaaagataaaattcttacaagtttaaattctgaaaaataaaaattcaacggttaacgctcattgccaaaaacaacaaagcccattctaatttgaacgggctttacaaaaaaaaagcaaaccataacaactccataaaaagtatgtttccggtcaaataaaagtaaatatgaaaatactttttgggtaatgagagactgcacaaaatttatcaaacaaaaaaaaatgctgtcttaaaccatttacgtttcgctccgctggaacttttctactatcggaaaattacatttgcaacaaaccttttgctttgctggagcagtttcgaaaaaaactggaatagttacttccgaaaaaatctaatttaaaaaaacagggctgactcatttttgagacagcccttattttttaaagtatctaaaatttgatctatgctaaaattttctcaattgcatttatttcgtcttccgcgaaatcaagattttgcaaacattcgatattattattcaattgctttacagagcttgctccgatcaaaactgaagtaattcgtttgtccttttggagccatgacaaagccatttgagccaaagactgatttctgtttcgggcaatttcgttcaactgaactaatttctgtatccgttcctgtgtcacctcatcttctttcaaatgtccgtttggattatgtgcccttgagttttcagggattccgtttagatatttatccgtcagaagtccctgtgccaaaggagaaaaagcaatacaacctactcccttttcttcgagaacatctaataagccgttttctacccaacgctccagcatagaatacttggcctggtggatcaaacatggcgtccccaattgcttcaaaacatctacagccactctggtttgttctgccgaatagttacttattcccacatacaaagcttttccacttctcacagcataatctaaagccatcatcgtttcctcaattggagtctcaggatctggacgatgtgaataaaaaatatccacataatctaccttcattctttttaagctctgatccagacttgacagtaaatatttacgagaaccccaatctccataagggccatcccacatggtgtaaccagctttggtcgagataatgatttcgtctcttaaatttccctgaaagttatgccagagtatttttccaaaattagtttctgcagatccgggaaccggcccataattattggccagatcataatgtgtaattcctttatcaaaagcttcaacggcaatacattccgcagcatcaaaattatctaccgatccgaagttatgccacaatcctaaagaaatctgaggcagtaacaatccgctttttccacatctgttatatttcattgttgtaattataagttttatagcatttaaaggtagaaacaaaccctattattttaaaagcaaatagtgctttatttttgtaaatttgtttaaacaataaatttatggaaaataactggcaaaacttaatttcaatcgatccggacattcggtttggtaaacctgtgattgcaggaacccgaatttgcgtctcagacattctttcctggctatctacagctatgactttcgaagaaattatagctgattttcccgaactaaaaaaagagcatattttagcggctttagcctttgctgcaaacagggaaaatataaccaaaataatcgcagcctaatgaaattacttttggatgcaaatatctcatggagggtaattaagagcattgaaaatgaattttcaaattgtttgcattgcaaagatattcgaataaaccagcctgcaaaagatattgagatttggaatttcgccaaacaaaacaatttcaccatacttactcacgatgatgattttgaaaaactattgcttttaaagggagcgccgccaaaagtaataattctaaagactttcaacaaaaatacgaaccaaattgctgagcttttaatctcaaaaagggaagctattatttcttttatttcaaatgatgacttactgatcttagagatttattaattgtgttgcttcaagaccggttttatgaacaaataaaattttgttatcaagacatgaatacttggcttttttgattacaaatcaaattttataactgtttcattccgtactaaaacaagaagctggcaaattcactttattaaacagatcagattgaattgtatttccccaggcaaaacgaaccttaaccggatttttaacttttttactgcttactacaacctgatcgtttctaattaaagcttcggccgtatagaaaataccatctgctcctgcaatttcaaactggttggacagcttatttttaaaatacaaaccatcggcatagtcaaaagaaagagttattacctctttatcgattttaaaactcttaaaaagaggtccattgaccagcccaacagtaattttataagtattttccatagccagattggctaaacggactcctactgtctttttatctttgggatgaatttcttttacatctgaaatatcactggttacagtcattccggtatttgaaacctctttgagtaattttctttgtgaatttcttacgatgacattatgaaaattattacttcccgttttaaaaggggcaatttgtgcataataaaacggaaaatcatcgctccaggctttccgccatgaggtaatcaaagccgataatgttttgtcatatactaaagaaccaacattcgattctccctgataccaaattgttccggcaatcttgtatccaacaaaaggatagatcatcgcattgtacgcacgtcccggctgtcggggtccatactcctgctcatttaattttcttgcattttctaacaaaacaggatccttctgaacgacttcttcgggcatccagacttctgcgggagtacctccccagttggaagatattaacccaattggaacattctttagttcttctcttaaacgtttggcaaaaaaataaccaacagcactaaagtatttcatggtttcgggagtcgattctgtccagttaccaagcagattgttctgttgtgttgtagctgttaatttcggaacgttaaaaaatcgaatattaggatttgctgcatttttagtttcttcctccccattgtctatcccccagcttgatgacatttccatattcgattgccccgaacagacccaaacttcgccaatcaaaatgtttttaagaataatttcgttgtaccctttgatagaaattacataaggaccaccggcttcgggtgtttttattttcagctcccattgcgccagattgtttgctttaactttatactcgatgttgctccagtcaaccactaatctgatttcttcctgtggattggcccaaccccaaatcttaacttcagcattgcgctgtaaaaccatattatcaccaaaaatattgggtagagagacatttgccatcataaaaccgggaataatcaacagaaagagaacaaacttaaacatattatttttcatcgtattgcttttttaagagaacctgcttagtctgactatagccatcttaatttttaagtacctattgcattttaacaatttcagctgttttagtccggtgatattgtaaaaaaacgctctacactttccataaaaaacatcgttcttaaagatattaatttttaaaaggataaaaaaacaacataaaaaaaactccggatacattacatatccggagcttctcgctttataactaatatatttaaaactcttagatcactgtgccttttagtgtaaggacttttggagtgctttcggcacttgtggttactgtaactgttttagtaaaaccacctttattggcagcattataagtcgcagtaacttttgctgattttccaggcaaaataggttctttggtataatctgttgctgtacaaccgcaagaccccactacatttgtaatgacaacagcagttttaccggtatttttaaattcgtaaacaattgcttttggagttccctgaggaatttctcctacatctatagtttcagctttccatactacagttgaagctgctgctgcagcaacttttgtttcagaatttaatgactttaacggtgcgattgccgaaaaagacattaaacctagtgccaaagctaacatcgaaattttaatcattttcatagctaaatattttattggttaatgatatttcaaaagtacttctgaactgatcaaatcgctgttaaccgctttcaaatctttgttaacgacttgttaattggcgtttttcactataaatttgattaatattacactttaaaaaactgttttcttgaaactcaacaaactcaatagcatcattttattaggcttagtggctattatcagtatactggtaacacagctgctttggaccaaagaagcttttactatagaacaaaaaaaactcagtcaaaaagcacatctcgctttgcttgaagtcgctaaaaaactatacgaaggaaccaatcatgaacttccggcacaaaatcctgttcaaaagattgccaacgattattatatcgtaaatattgacaatgattttgaacctgatattcttgaattttacctgaaaagtgagttcaaaaaaatgaacattacgactgattttgaatatgcgatgtacaattgtcagagtgacgaaatggtgtatgggaattatatttctctatctgaaaaaaagacaatcaagcaaccggtttattttccaaaacacaagaacctggtttattatttcgccatacgttttccaaatgagacgacctatttgtttagttcgatgcgattctggtttattctttcgattgctctgattcttattttattaatttatgtgtactcgattttcacccttttacaacaaaaaaaatactccgaactgcagcgtgatttcatcaacaatatgacgcatgagtttaaaacccctttatcttccattctgattgcctctaaatatctgatcgagcagacacctattaaagaagacaaaaaactgtatacgtacactgacatcattatcaaccaaagcaacaaactgaatggtcatattgaaaagattttaaatgtggctaaatcagattatgcaccactggaattaaagaaggaggcggttttagttgttccgattattgaagaagtaattcaaaacatccttttaaaatatccggaggcaaatatcaaaattgaaactctttccaaggagcacaagatcgaaacggacgtttttcatttctcgaatttagtttataatttacttgataatgccgttaaatattgttccggagaatgtctcattctaattggaataacggccgaaaattcggttttaaaactggctttcaaagacaatggagttggaatttcatctaaaaacctttcttttatttttgataagttctaccgcgctcaaaacgaaaaaagcaatgaggtaaccggttttggactaggtttgtattatgtaaaagaaatttgcaacttgcataactggaaaataaaagcggagaacaattccgaaaaaggcatcactataactttatcaattccatataaaaaatgaaacagttcaaaatactttatactgaagacgatgaaaccctggcatttctgaccaaagacaatctggaacagaacaactatgaagtgaatcattgccgtgacggacaaatgggtctcgaaaactttaaaaaagaaaattttgacatttgtattcttgatatcatgatgcctaagatggatggctttgaactggccgctcaaatcagaaaatgcaacagcgacattccgattatctttctttccgccaaaacattaaaggaagaccgtattaaaggactgcgtttgggtgccgatgattatctcgtaaaaccttttagcattgaggaacttcttttgaaaattgaaatttttctgaagcgttcgcagaaaaacattctgattgaaaaaccagtttatgagattggcaaatatcaatttgacacgagcaactttgttcttttcaacgaaaatgaaaaaatcagccttacgcagcgcgaagccgaattattgaaattattccttgacaataaaaactccgttttaaaaagagaacaaatccttacctctctttggggaaccgatgattattttatgggacgtagtctggacgtttttatttcacgtcttcgtaagattctaagcaacgaaaaaggcatttctattgagaaccttcacggaattggttttcgatttaccatgtaatttataggcttaaattcttcctttttttgtattttagtacttattttctccaatatgaaattacatcatttacgcaacgccactttagttatagaaactgaaaccgatgttatattggttgatccgatgttgggaaaaaagaaaacgattgcaccttttactattttccgttacaaacccaaaagaaacccacttatcgctttacccaaaaacagtagagatattttgagtaaagtaaccgtatgccttattactcacttacatcctgaccatatcgataaagcgggcgagatttttttaagacgcaaaagtattccggtcatttgcagcagcaaagatcaaagtgttttatcgaaaagaggtttaagcatcgtacaaaccttaaactattgggaacctcaggaatttctgggaggtaaaataacaggaattcccgccgttcatggttatgggtttgttgccaaacttatgggaaacgttatgggctttcatatcgaattaccccatcaaaaatctatttatatcagttctgatactatttttacggaacatgtacaaaaagtcctgattgagtttaaacccgacatttcggttgtcgcctgcggaactgccagattagatttcggtcaacccttattgatgcgaatgaacgacattctaaaatttgccgcacttgctcctggaaaagtatttgccaatcatctggaagctttaaatcactgtccgaccacaagaacagcattaaaacaagcacttctggacaataatcttttggataaagtttcgattccaaatgacggtacctgtgtagcatactaacccttcatttagcacaaagaaaaactacaaaaccaataatccgaactcacgcaaagtattgacgggtttggaataccagaatagctcgaaatcgtctaaattggtctcaaaatcattcttcacttcctgaaaagtgtaatttttagtatttgaaatagccattttacttaaaatttgaaccagccattctccttcttctttattcgtctgaatgttgaaactttcttttttatcatggaaagtaaaactcatcatttcccagcttcttccttttttagattttgtgaaatgctccacaaatggtttcccacctaaccagacaacttttgcattcggtttggtattgaaatcatttccttcttcaagggcattaaaaataaagtccgggtctattttggtcttcggtattttaaaatcaaaccaatcctgcaattcgtaatcaaaacagattccgtgcataaaattaaaaagtgatttcttcaatccaaaactaaacttatcgtgattgattcctgtagaatcggtataatcaatatcattattggcaaaagttccgatagcttccgttgcttttgtgacaccaaatttttccggatacaatccaaccggactgtgagctgtcatcgcaaactggtgccaaaatcccgactgcagaatccctgcctcgaataactgacgaaccatttcgagactatccaccgtttcctgaatggtctgagtaggataaccgtacatcaaataagcatgaaccataattccggcttcggtaaaatttcgggttactctagcaacctgttctactgttacacctttgtcaattaactttaataatcggtctgaggcaacttctaaaccacctgacactgcaatacagcccgaagctttaagtaataaacacaaatctttcgaaaaacttttttcaaatcgaatattggtccaccacgttactgctaatttccgacgcaaaatttctaaagccaaagcacgcatcaatgccggcggtgctgcttcatctacaaaatgaaatccattctgccctgtttgcagcatcatttcctccattcgatcgcacaataaattagccgctaccggttcgtaaacttttatataatctaatgagatatcacaaaaggtacattttccccaataacaaccgtgcgccatagtgagtttgttccaacgtccgtcactccacatccggtgcatgggattcacaatttcgattaccgaaatgtacttatccaaaggcagatccgaataatcgggagttccaacctgagactgtttataatcgtgttttaaggaattgtttttgtagactacttctccgttttccagcagaaaagttcttttgtatcgcttctcttccctcgactccgctcgggacgacaagctttcaataagttcttcaataggaacttctccgtcatccagagtaataaaatcaaaaaactcaaaaactcgttgatccgaaagtgaacgcaattcagtatttgggaaacctccgcccatcgaaattttaatttccggatgatgctgttttacccattgtgcacatctgaaagcactgtacaaattccccggaaaaggaacggatatcaaaaaaaatgtaggctgaacaatttctattctttcttttaaaatcgaaattaaaatggcatcgatgtaggttggttcctgctgtaaagcttcgtacaattcatcaaacgaattggcacttcgtcctaaacgttcggcatatcggctgaaaccaaaattctcatcgatacattccacaataaaatccgaaatatcctcgagatacagggtcgcgagatgcttggctttatcctgtgttcccatggttccgaaagcccaatccaattcttccaactgtgcaaaacgggaggcctcgggcagaaaatcttcctgacagatctgtaaggccaaagttggatttttcccttgcagaaactgaattactgcatcaattgttttgatgtattcgtcctgcaatgcaaaaatacgtttggaattatctgaaatgtcttcccttgactccgctcgggaggacaaatctttaaaaagattttcagaataaagaaacaaatcaattaaacccttcttcgaaaacaattccagaattacatcaatacccaaatcagcctgaaccgattcgatatttttggtattcagaaaaccttttatatacgccgtcgccggatacggggtattcagttgcgtaaaaggtggcgtaattacaaaaagttttgttttcaaaaggaatttatttttttgcaaaaatacgggatatttataatcatttgacaaaagaaataaatctaattatttcgttaacgtcatcaaatgttataagtttttatttattgaaataaaacttgcaaacatttgtatttcataatctacagcatcgttttttggttatatttgcttacaaattttctctaaatgatgctaagaactttactcctatttattgtttttatcaaatgttcttgtgtttttgcgcaagaaatgaatactaattcatctaatagtattttattagaagataaacatggtcatctcattcaaaatttggaagagcaaaaacaatttttgaaaattagagaggcaaagatgaaagctgaaatcctgaatttaaaaaaagtaattttgaattcgaaagggagaaattcgacttcaaaaactgccgctactcttcaaggagtagaaatatgtacaaatggaggttttgagcaatatgaaactataaacggaagcagttatcttaagaattttctttatacaataggtgatcctcccggtccaacgcagtgccgatcgattaccaatactgccgattcatacatcaatcgctataaccctaataatatgaacattatggcgaccagtgtttcctccaatttggttgacccctatataggagacattaaagcatttgatcaatatactcttaaaattaatcatgagaactcctctacctatggttctattgttcaaggtaaaaggtttaaaacaaacaatgaaaattatctgaaatttaactacaaagcggtattacaaagtgtgtacgacaatagccacactgataatcaggcttttgtaaaagcccgaattttagataaaaataagaccgttgttagcgaattttgtttggtaggagatgaaaaaaattgcattttcagtaaggttccgagtcaaaattccggttatgttactttatacactcccaattggcaatcaggaatactggacatttcatcaattcctaattacgaagaatttaccgttgagtttatggcttccagatgtggattgggaggacatttcggatatatgtatgttgatgatgtttgtatcttacaatccgcagaaaacttacaaggttctatagagcttgatcctttaaataaagtttgtccaactttaccaatttcagtatgcggtagttatacgattcctaattccggaggaatttctgcctcagtaaaaaaaatcactttaaatgtttacaacagtaataatgtgtcaatttataacacatcaactacttcaaacctggacacaacaaacaaaaaattttgttttacattaaaaagcagtgatcttccaaatattacaaatgctaattataatgtaggtgtacaaatagattatgatatttccggaacttcttgctcaggaaccacatttgattctgctatagatcccgatgcaaatcctggctgggatatttcttttttgaattgttcttcaagttgtaccattaatgttacgacagccaaaatatctcaatgtgacgcaaaccgtgatggaaatgaaaattttgatttatctagattaaattctttaatagttccttctacagcgggcttaaatttcagttatttcaaaaattacaatgaggcggagtccaatttgaatgctattaccaattttacaagttacccaagttcaagtgcttctatttttgttagagtcagcaaggatgctacttgctacaaaataatttctgccaatttagaggtaagaaatcccacagcaaatattacaggtatcctaaatgtttgctctggaagcactgtattaaccgcttctccaggggcttcgtatttatggaataccggtggaactacgcaaagtattaccgtaacttcgttaggaaattactctgttactgttacagattcttttggatgctccagcaatgccaatgttactatcgaaccaagtcaaactgccgtttctcctactttacagattacgcagccctcttgtttttccactacaggaacaataaaagtaacttcgacggcatcacaatatagttttgatgatggcgtaacctggagcgcaagcgatacgaagagtaatttatatcccggaacctatttagtaaaaataaagaccgtgaatggatgtacttcttattctcaaagtgtaattattacagctgcttctactctgtatccaaattacacttatatcaatcctttattttgcggagataagggaagtattaccattacaactcctgctgcatactatagctttgacgatggtgcaacttgggtaaataattctactgctaacaatctttcaccggcaaattataaaattcgtaccaaagatttacaaggttgtatttcgtcggcaaacaatgtactcatcagcagcaatacgctggaaactcccacgtatacaatcgtattacccgcttgtagtacaaaaggaagtattaccatcaatactctttctgatttttacacttttgatggaggaactacatgggttaccaataatacaatgagtaatttaaatgcgggaagctattctttaggaattaaaaatgccttaggctgtacttcctattatacttatgcgtatttaaataattttaaagattcctatcctcaatatacaactgaacaacctatttgcggagtagacggaagtattacaattactacaccagcagatttgtacagttttgataatggagtaacctggacaagcaataatgttaaaattttaccttttggaaactatcaaataaaaataaaaaacagtgcgggatgtatcagctccgctaattatgcttctttaaatcaaccttatataagttccccaattacttccatagaacacccaacttgtggtgtaaacggaaaaattactattaactcattatccgatttttatagttttgacaatggtgcgacctggacaactcttaattctaagtcattacctcctggtgtttataccgtaattacaaaaaataatcttggctgtacctcatatccaactggcgtttatttaaacaatcccaatatagatctacctgattatactgttgttcaacctacttgtacgtcgtcgggcagcattacaataaatacagctgccagtttctatagttttgatggaggttatacctggggaacttcttcttccttatcaaatcttaattcttacaaattttacaaccttacaataaaaaacagtttaggatgtgtttctaactccgtaggtgtttcaattaacaccccaaagctccctgttccggattatacagttacgaatccaagttgtggaaatattggtaatattacattcaacactactgcagattattatagtatcgatggtggtgcaaactggagtaccagtaatgtttttaataatttaagccaggggtcttacaatttaattataaaaaagagtaactgtacatccaattccatttacatttatttggatccctctaagctggcacaacctaatttaaccatcacacagccaggatgcggtacaaaaggcagtattaaaattaatacgactgccagcttttacagtattgacggggtaaattgggggacaaatcctattttttctgatcttccggcaggatattatttcccagcgattaaaaatgccgtaggttgtatttccagctcaaacggggtatcacttcaagagttttttctcccggcacccacctttaaaacaacacagcctacttgtggagttggaggaagcataacctttacttcaactgaagcacaatacagcatagatggaggcagaaactggagtactagtcctgtatttactaatctaagtccaaacacttattatttattagtaaaaaatgctaccggatgcacatcatcgtcttacggtgtatatgccaacttgcagcaatattatttacccaatccagattttacattaattcagccaacgtgcggcattgatggaagtattactattgcaacagttgcaagttcttatagttttgacaatggtaatacctggacaactaacccaactctttcaggacttacttctggttattacaacatcatgataaaaaatgcagcgggttgtaaatcttatggtttatcaataagtattgctccttattatcttcctaatcccaatataaaagtagcacaaccaagctgcggaaatggaggaagcattaccgttacaactcctgctgacaattatagttttgatggaggcagcacttggactacaaatccaattttattaaatcctgcaagctcgtattatactattcttattaaaaatgcaaaaggttgtaaatcaaattcacaatatgtcaacataaacaaattttatctatcctcaccaaatatatctgctattcaacccaactgtagtactactacgggaactataatagtaaatactactgcagaccaatatagctttgatggaggaataacctggactacaagtcctgtaaagaaaaatttagcaggcggcccctacaatgtattaataaaaaacactctaggctgtacctctagccgcagctatatccatataaatacacctcctgcaattcctgctgcacctgctgtaaccaaagttcaaccttcttcctgcgatgctactgatggcagcatcaccataactacaccagctataagttatagtttcaatgatggaaacagttggacaacaagtcctacgaaaataaatgtgggggctggtacctatattattaaaatcaaaacaaattcatatagttgcgagtcatcaacagctgttgtcaatttaagtgctggtcctgcaattgcagctccggtttttactaccacacagccaaactgcagctcatcaaaaggctctattaccattacaacaaatgctgctacttatagctttgacaacggattaacctatgttttttctaatacaaaaacagatcttcctccgggtatttatttcataaaaattaaaaattcagcaggttgtatttcagatgctgctccggtcacgatctcgccattattaccgcttgctgctcctgactttacagcagttcaacctacttgcaccaattttacaggatcaattacaattaataccgtagccgatttttatagttttgataacggaatcacgtttgggacctccaatacaaaatctaatctgtctgcaggaacctataatttgatcgttaaatataattcgggttgtatttctcttgccactgccattactatacaagccgcacctgcaattcctgaagcaccacaagttgtagtcacaaacccaactggctgtaatcctacaggcactattacggtttcaacggttgcaaatctgtatagttttgacgatggccttacctggaacaacagcaatactgccagtttatctcccggaaattattctgttcgaataaaatacacaaatggctgtgaatctattccatatagaaccaccatcaatgcagcaccaaatgctcccgcagctccaatttttactattacacaacctatcacttgcagcaatccatttggctcaattttaattacaaaccctgctgatcaatatagttttgacaatggtaaaacgtattcagccagtccaaattcaggaaatttaatcgtcggaacctatatggttcgtgttaaaaatagcatcggctgtgaatctgctccaatatctgcaaccattaaccgtccaacagattatccgaacgaacctgcatttacaactatccagcctgattgcagtaatcctaatggtgctattacaattaccgatgctgcatctgaatatagtttcgataatggtgttagctggactaccactgcaatgaaatcgaatcttgctcccgacacctattttattaaggtaaaaaataataagggctgttcttcaaatgcaaccacagttactataattccttttacaaatttcactcaaaatccagctttatccggtccccaaacattctgtattgaacaaaatgccacgttaaattcaattacgatcacaggacaaaatattaaatggtatgatgcaccagtaaacggaaacactttaccaaaaacaactttattagacagcagaatttattacgctacgcaaacattaaacaattgcgaaagcctaagatttcctgtaccagtaaaagttcaaaacacacctatacctaatgccgattctcctcaacaattctgtattcagaaaaatgcaagaattagggatattaaaataacagggcaaaatattaaatggtacgaaactgcttcatctactataagcttatctgaaataactgaacttgtagacggaatcacgtactatgcttctcagtcttttagtggttgcgagagtgacaaaacccccgttacaatcaatattcttggagcgacaataggagaatgtatctattttgtagatgaacttccttatcctaaattctttaccccaaataatgatggctataacgatacatggactattgattttatctatttagccccaaataccggaattaaaatttttgaccgttacggaaagtttatcaaagaaatacgaccagacaatccctgggatgggacatatcttggacaacaagaaccatcttcagattattggtttactgttacaagaataaatggaaaagaagttagaggacattttagtctgaaacgataaaatatgccatcgcaaagctttatcaatactaaactttgcgatgtttctgttacacttaaaacttatgttcgtctttactaatcattaaaaaagaaaccaacgaaattagcgcggcaccagtcagataaaatccaacataatttaaaccgtaagtacttgccaaccaaatggcgatcataggcgcaaacgccgcacccagaattccggccaaattaaacgttaaggaagctccggaataacggacatttgttggaaataattccgacaggaaagttcccaaaggtccataagtgaatcccatcagagccattcccgtacaggcaaaagtggtaatgagaatgatatttcctttgcttaaaaaagaagaaaacaaaaacccgaaaagcgctatggctgtggttgcaataagtaacattttgcgtcgtccgatcttatcggcaacaactgccgaaaccggaataaaaagagcaaaaaacaaaacagagaacagctgaaccaataatgcatctcttttggtaatccccaaatctgaagtgatccagcttaaagtaaaaacggtcatcaggtaaaaaaccaaaaaggtggtaacagccgacaatgttccaaaaatcaattgatttcgatacgacttaatcaaagttaaaaaaggaactttaacttcttccttttcttttttagcgctttcaaatgaaggcgtttcggtaatttttgttcggatataaaaccccacaacaaccaaaaacgaacttgctataaatggaattctccagccataatccataaagttttcattggtcatcgtgtctgtaagaattagaaaagttccacccgaaagcagcaatccaataggagcgcccaattgcggaaacattccgtaccacgcacgtttatccggaggtgcattttcgattgccaataaaacagcaccaccccattcgcctcctaaacctacaccttgcccaaatcgacacagcattaacaataaaggagcagcaacaccaatactggcataaccgggtaaaaatcctatcgtaaccgttgaaatacccatcgttaataatgctgccaccaaagtaaatttacgcccgattttatctccataatgtccaaaaaaagcggaacctaacgggcgtgataaaaaagcaatcgaaaaggtagctaaagattccagagttgccatagtcgggtctgaaccggggaaaaatagttgcggaaaaaccaatacggcagcattggcataaatatagaaatcaaaaaattctatggtggtaccaatcaaggaaccaaagagaacatgttttaaggagttcttctgtttcgggttattttccattcggctttactattgttttcttttaactattactgcaaaaaataaatcagcttcttctgcacaacaaatatttgtttgcaaaaatagaatttcattattaataacacccataaccaaacaatacttttaaattactctcagaattttaacaaaaacaacaaatcaaacaccctaatcattcacaaaacatttcttacaataaaaaaagagacaacaaaatcaaaacactgatttacaacaacttaattcaaagcgtaaaaatcaaatcttaagcattcgttaaaaaaggatttaagtacatattttgattaaatttacagctatcaaaaataaacctaaaactatgcctaccgactgtatcagctatcaaaactcaggatatttctctaaattgatacaagattatttagatcaaaaacccgaattacaatcactgtacaatcactttcctacgcttgaaaactttgagaaacaaatccttgacaagcaggctaatttcgaccatgcaaaccgtgtcccccttgttgaaacgctaaaaaagcaatacgaaaacatcaaaatttcagattcgaccaaagagaatatcgagcttttagcactcccaaatacttttacaattacaaccggacaccagctaaacctgtttagcggtcctttgtattttttatacaaaatcatttcgacgattaatctcactacggaactgaaatcaaaatatcctgctcataattttgttccggtttattggatggcaactgaagatcacgattttgaagagattaattattttaattttaaaggaaaaaaattccgttggaacaaagaaagcaccggtccggttggaagactatcgacagaaggtttagaagatttttttgaaatctactccaaagatttgggttcgagtacaaatgccaacttcttaaaaaaactctttgaagaagcctatctgaagcatgaaaaccttgccgatgccacacgttttttggcaaaccgcttgttcgaatcgtacggtttagtgattttagacgcagattcagcagatttaaaacgcgctttcattccgtatattaaagaagaattggagcagcaaacggctttcaaagcggttcaggaaacaatctcaaaatttaatgattacaccattcaggtaaatcctcgtgaaatcaatctgttttacattgaagaccaactccgtgagcgaattatagtagaaaaagaccgatacgttgtcaaccatactaaaatatcattttcgaaagaagaaattttcaatctactcgaaagcaatcccgaaaaattcagtccgaatgtaatcatgcgtccgttgtatcaggaaattattcttccaaatttatgctacattggcggaggaggagaaattgcttactggctggaattaaaatctttttttgatgctgtgaacattactttcccaatgttattggttcgtaattcagtacttttaagtaccgaaaaacaagctaaaaaagcagatacacttggacttcactggaaagatttatttactaaacccacagatttagtaaatgctattacacataaattatctggttttccaattgatttaacgccacaaaaagaaatgctggtcaaacaatttgaatatctttacgaattagcacaacaaactgataaatcctttacgggagctgtaaaagctcaggaagtaaagcaaaagaaaggcttagacaatctcgagaaaagattattgaaagcacaaaaacgaaaactggattcagaaatacaacgcgttgttgatttacaatgtgaattgtttcccaatcagagtttacaggagcgtcaaaccaatttttctgaattttatctggaaaaaggagaagaattgattcctcttttaatacaaaatttaaaacctttagaaacgaattttaatattatcacgatctaaaaataaaaaagtaatagtcatcagaataaataaccgcctcttctgaaattattgcggctctaaccaaatagtaaccttttaaaaaaaaaattaacctatttaccaaaattatgaccagagagcgcctgatatcattagatgtctttagaggattgactattttattaatgactattgtaaacaacccgggagattggggaaatgtctacgccccgttactacactccgaatggcatggctgtacgccaaccgacttagtgtttccgttttttattttcatcatgggagttgcggtacccctggcaatgccaaccaaaacctgggacagtactaccttcaacaaaattctggttcgttcgctacgcatgctcggccttggaattttctttaattattttggaaaaatacagctttttggccttgaaggaattccgcttcttatcggccgattgattatcactgtagcagttggctatgctttgatgggcaatttcagttcgaaaatcaaaaacatactggcattttcaattttgtttgtttatctgtttctggcttacagcgggatcgaagcctaccacgatgtgcgattaccgggtgttttacaacgaattgcgattgtatattttgtcgtttctctattgtacttaaaaacaactcaaaaaacacagatcataaccggtattactttattactgggctattgggccataatgactttaattcccgttcccggaatcggagcgcctaatttagaaaaagaaaccaacttagcttcctggctcgatggtgtattactggaaggacatatgtatcgcggaaccataacctgggatcctgaaggagttctaagtaccattccgtcaatcgtgaacggaatcattggtttattgattggtcagattttacagcgtgaaattacaccaaaacagaaagccgttaaaatgatagctgcaggtgttgccttaatcattggagggctaatctggaacgccttcttccctatcaacaaatcgctttggaccagcagttatgtcttatacactacaggactggcaactgcttgtttagcattcctatattacatcattgacattgcagcctacaaaaagggtctaaaattgtttttaatctggggagtcaatccaatgattgtatttttcttctctcagattatccctcaggctttagtgatggttcagtttaagaacccgcaacatccagaagaacagatcaatcttttaagttatttgtaccaattcggtattgctcctttctttagcaatccaatgacagcctcgttagcaggagcattaacttatgttggaatctggacttttatactatggattttctacaaaaacaaactgatttttaaagtttaaaaataagctatatccacttcgattacaagagacgcaaaaacgcgtctctttttttcttcctcacattaaaacaaattgacaactcctatgagtactatttttcatttttctttaccaaaacatcatttgttagagttttaattatgaatttattaaaatcaattcataaaaaaagtatacttttgcacgaaattaaaaataagcaataaaatggcaacaaatagaacttttacaatgattaagccggatgcagttcaaaacggacacatcggaaatatcttagcaatgattactaatggaggtttcaaaatcgtttcattaaaattaactcaacttactgtagctgatgctcaagcattctacgcagttcacgcagaaagacctttctacggagaattagttgaattcatgtctcgcggaccaattgttgctgcaattttagaaaaagacaatgcagtagaagatttcagaactttaattggagctacaaatccagctgaagctgctgaaggaactatccgtaaagcatacgctacttcaatcggagaaaacgcagtacacggttctgacagcgacgaaaatgcagctatcgaaggtgcattccacttcgcaggaagagagcaattctaatatttttagactttcttagattgttagatgttagacttcttagatcttagaaaagacataaaagaaaacccgtttcaaatgaaacgggttttcttttataacatcccagccaaaatcaaacatttaaaaatctaaggagtctaagttagtctaagccagtctaaaaaatctaacgtaaaacaacttctttcaccacttcacggcctaactcctcgttgatcatttttacaatcttgcttttaccatgacttaattcttcacgcaaaactgccgatcctagctcgacatacaatgtacttcctttcagaacaacatttttggtatacgtattcacgccattccccatcaactgcctccaggcctcttttacatcaatctggtccattccggcacctaacttattcacttggataatctgctgcaaaacagctccaatcgtgctttcactatttagtctttttgccatcgtttaataaatttacaggtccggtttttttataatgatattctttattctgatcgttctttactacaaaagtctcgtcagaaatagaaatcagttcttcgctccactttgcataatctgttttataatccaggaaaacctgatctcccttaaatcgaaccgatacatcttcaaaagtatctgttgttaaaaaagttccatccagctgcgccatcaccttggtacgcgttcctttagttcctttgatattgaaataatcgaaattttcgttcattccgtaatctttgtcctcacctttatcaaaaactactttctcaatttcccaataaccattcagttttgcaatatcagcaggtttaatttcttgtttacagcttatcaacaaaagcgataaaaccaaaatcataaaagtgtttctcatactataatttttaaaattctactcttctcttttctccttgaaaaatcccggtccaaaaaaacaattaaccgctatataccttcatttttacagtaaatagtacaaaaaaaacaccgttttcctgtggactaaaatttctcttttcaaaagaaagatgaacctgcaaagttaaacttaaaaacctcataagaagcaaaaaatcacaaaaccatttaaactattttatatctttctggtcaaacctcaaaccaaaataaaaaaacatgaccaaagctatttacaccatactgattgctatcctcttaacaggctgcagcaaagattcgtctgagtcagaaccaattacagttcccacagaaaacatgtatttccctccagtaaccggaacaaactgggaaacaaagtcaatcgctgatcttaaatggaatcaggctgctgttcagccacttttagattatttggaactaaaacattccaaatcgttcattatactggttaacgggcgaattgttttagagaactattttaacgggcattcagcaactaccaattggtattgggccagcgccggaaaaacattaacctctactattacaggaattgcccaacaagaaaatttactgaatatcaataataaagtttcccagtatttgggagaaggatggacaagtgaaactttacccaaagaaaatttaattacctgtaaacatttattgactatgacctcagggctcgatgacagcacagacgatgtaaatcctgctaatctagtctataaagccgacgccggaacaagatgggcctatcataatgtttatgtaaaactacaagatgttgttgcaaaagcaagcggacaaagctgggaaaattatttcaacaccaaattaagagacaaaatcggaatgaatggaaattgggtacaaattggtgccaatagcgtttacaccagcacctccagaagtatggcgcgttttggacttttaatactgaacaaaggaaaatgggaaaataacacaatactcaacgaggcctatttcaatgaagcaactacaacttctcagaacatcaatttaggatacggttatttatggtggctgaacggaaaaagttcttatcacttaccacaatcacaacttacttttcagggaagcataatcccaagcggaccaaccgatatgtttatggctttaggtaaaaatgaccaaaaaatatatgtcatacccggtaaaaaaatggtagtcatcagaatgggagatgctgcggacagtgttaatctggccttatccgattttgacaaaactttatgggagaagatcaatgctttgtatcagtaacagaaaagctttaaatagaaatgctttcgaaaacattactatttaaagcttgttatttttttgaaataatatctgtgtgctgctattaacgattagttcgcattcttttaaaaactcctaaaaagaataaaactattccgattaccagcaaagcataataaacggaaagattactatctttcaatacatttgctaaaacaaaacatatcacactggcaaaataaaaagctatcgctgatatattttttaaagattcgaaacccattataaattatttaaaaaaactatccacaaattcatatttattaaagacctgaagatcttcaattccttctccaactccaatgtattttacaggaatctgaaactgatctgaaataccaattaccacaccgcctttagctgttccgtcaagtttagttacagcaagagaagtcacttcggtggcagcagtaaattgcttagcctgctcgaaagcattttgccctgtagaaccgtctaaaactaaaagcacatcatgcggagcatcttctacaaccttttgcatgacacgttttacttttgtaagctcattcatcaaattgattttattgtgcaaacgtccggctgtatctataatcaccacatcggcattttgtgctacggcagattgcagtgtgtcaaaagcaacagaagcaggatcactacccatattttgtctcacaattggaacatctacgcgatctgcccaaacctgcaattgatcgatagcagcagcacgaaaagtatcggcagctcctaaaacgactttataaccggattttttaaactgatacgctaatttaccaattgtagtagtcttacctactccattaacacctacaaccattaaaacgtatggttttttattttttggaatctcaaattccgttgcttcgcctgtattggtttcagacaataaagcacctatttcctcgcgaagaatctgattcagttcgtccgttcctaaatatttatccgcggcaacacgtttctcgattctggagattactttcagcgttgtgtttactccaacatcagaagctactaaaatctcttccagatcatccagaacatcatcgtcgactttagattttcccgcgacagctttgcttaacttggagaaaaaactagtttttgatttttcaagacctttgtctaaagtctctttcttatcagtagagaataattttttaaaaaaactcattttttataggttgttagttttttagattatgggataataaaacccaaataatctttaatctttaaggaaacttaaaattagtcatgtttctttaaattttagacaaatataaaaaataaaaaagctacttccgaatgaaagtagcttttctatatactgtgattgttattatttctttttcaagaactcatcaacttcttcaggagccataatagattctacgaatgtatatgcaccagttttaggagattttaccattttgatggcttttgataatctcttagaagatgtttgtaacgatgctacggttttctttgccatgattcaaatgttatttgaaatttttaatttaaataaaaatctctaattaattacttaatttctttatgaacagttacacgtttcaagattggattaaattttttaatctctaatctgtccggagtatttttcttgttcttagttgttatgtatcttgaagtacctgcaacaccagaagtcttgtgttcagtacattctaaaatcacctggattctattacctttctttgccatcttgctatatatttatttaggaaaagattatttgataaatccttctgactgtgcttttttcaaaacagcagtgattccatttttattaattgtttttatcgtagatgctgctactctaagagtaatccatctatcttcttctggaagataaaaacgctttttaactaagtttacagaaaactttctcttagttttgttcatagcgtgagaaacgttatttcctaccatcgctcttttacctgtaaggtcacaaactcttgacattatactttacttttatcgttattcaaaatcagggtgcaaagaaaagaaaaataaaccattgtagcaaaaaattattgcacaatttttaaaatttctttcttcaaaatttctaaactcttattcactgctctatctatcactttttcacggggttgaccaaagttgaattcttctacgattataccctccggagttgctaaagcgataaaaacagctccaatttcagcttcagagtctccttttgtcggtccggcgtttccggttgtcgcaattgcataatctgttttcagcatctccttcacattcaaagccatagccgacgcaacctcagcacttactaccgaaaacttgtcaatcaaatcctgtgaaaccccaagaacattgaccttcgcctctgttgcataggaaaccacactacccttaaaataagcagaagctcccggaattgccgacaaaatggaggcaatttttcctccggtaaaactttcggcagttgagatcgttttattttgtttggttaagatcttacccactaccgtttcaatagtttcgttatcctcatatcccactataatatcatgaattatagcatctaaagattttacattttcttcaattgcagcttcaagctcttctttattggttcctctggccgacaaacgcaaacgcactcgcccgggattgggcagataggccaacttgataaattccggcagattattctcccaatcttcaatacgttctgcaactaaactctcgccctgaccataagtcaaaattgtcttatgaatgatatacggacgtttgtactcgcgaattattttaggaattatttcttcttcgactaaatacttcatttcatacggaactcccggaagcgaaacaaaaacagtattttctttcttcatccacatgcccggagccgtacccactttgttgtgcaaaacggtacatttggaaggaaccagagcctgatctttattcaactgcgaaattgggcgtttgtaaaaaccttcaattaactccgtcacgtgagccaaaactttagcatccaccaccagctcatcctcaaaatactcgcaaaatgtttttcttgtgacgtcgtcttttgtaggccccaaaccaccggttacaataaccagatcaactttgttctgcaattgggcaaatgtgtctaaaatatgttttttatcgtcacttatcgaaatcatttcatgaacttcgacaccaatgcgatccagtgattttgcaataaaacccgagttagtatctacaatctgacctattaaaatttcatctccaatagtaataatgcttgctttcatagctgtgaattatttttacttatcgtaagtccaattattataataaagaatattgttgtcgtgattttatacgaatgccagacatggcttgcttttgcaaaaaaaaagaatcagatcaaagatttacagatcaaagtcttttttaatctctttgatagcttcttttacctgtaacttaatactcttaaaagtttcgataatttcttttttcttgccttcggctttggtccatgcttctacctgaagaatttcctcaaaagcaacattcaaccccattaagtccaatgtaggttttattttatgtgcataagaataggcatacttatgatccttctttttaatcccttccttgatttgttttaaatcttcaggaacttcagtaacaaacaatttaagaatttcatttacaaattccggatcattgtctgaaagtgcatatactttcgaaaggttgtattttaaagccattactttacttgtattctgaataattttttatcttctaaaaagccttctaaaacgtcattcggcttaaccgcagcaacaccttccggtgttcctgtaaaaataatatctccaatttttaatgtaaaaaactgcgatacatacgaaacaagctcatcaattttccaaagcatgaaactcgtatttcctttttgaacggtttcagaatttttcgtcagctcaaatgtaagattttccatcgaaacaaaatcactctttggtaaaaactctccaataaccgcagagccatcaaaagcttttgctttttcccaaggcaatcctttcgcctttaatttttcctgtaaatctctggctgtaaagtcaatcccaacactaatttcgtcatagtacttgtgtgcaaatttaggttcgatgtattttccaaccttactaattttaacaattacttctaattcgtgatgaatttcttcagaaaattcggggattacgaacggatgctgtttcaataaaactgccgaatccggtttcataaagactaccggttctgcaggacgctcgttttttagctcttcaatgtgattggtataatttctaccgatacagatgattttcatttttctatagattctaagactctaagccactaagactctaagaaactatgcaaaaaacttagcacctcagaaccttagcgactcagaaccttatttcgtatttaattttcttaattttatagccgtaagtacttttttggtatacaaaggaaaatcggcattttgaatccagctgaaatagccaggttcactttctaagactttatctactttagcacctttgtgttttccgaaagtaaaaatttcttcgttgtctttatcaaaagcaatcattccggcaaaatcggcgatttttttacgggtggtaaattcagacaacgatttcatatcgttttccaattccggataacggtctaattgtgcttttaggatttcataggtcgccattgtatcggcttctgcagaatgtgcattctccagactctttccgcaatagaatttcaatgcagcacttaaagtacgctcttccattttatgaaaaatcgtttgtacatctaccgaaactttgttcttcatatcaaaatcaactccggcacgcagcaattcttctgctaacaacggaatatcgaaccgatctgaattaaaaccacccaaatcactgtctttaatcatattgtaaacctgtggtgccaattctgaaaaagtaggttcatttgctactttctcatccgtgataccgtgaacagcagttgtttgcggcggaattggaatcgtaggattcactaaccaggttttactttctttatttccgtttggaaaaactttgaatatcgaaatttctacaattcgatctttaccgatatcaattccggttgtttcaagatcaaaaaagcaaattggtttgttgagtttgagttccatttttaatttttataagattacaaatgtaatttttaaagccgaaattcctcttctattcccgacttttttaaacaaaaaggggcgtaattccgcgattttaacttttaaataggttcgcaaagtcggctaatgtttgttttcttaaccttttcttacaaaacaaaaaacccgggaatttatacaaattcccgggtttaacttatttttaaaacagaatttaaaaatctctgttcacatcaaaagcttctaaatattcagcaactcttttcacaaaacttcctcccagagcaccgtctactactctatggtcgtaagaatgtgataagaacattttttgacggattccgataaaatctccttccggagtttcgataaccgcaggcactttacgaatagctcccaaagccaggattccaacttgtggctgattgataattggagttccgaaaacacttccgaaagttccaacattagtcaccgtataagttccgccttgtgtatcgtccggtttcaattttccggcttttgcacggttacctaaatcgttcaccgctttagccattccaaccaaattcagctgatcggcatttttaattaccggaacaattaagtttccgtttggtaaagctgccgccatacctaaatttatatttttctttttgatgatgtattcgccatcaacagaaatattcataccagggaaatcttttaaagctttagccactgcttccatcataattggagtaaacgtaagcttctcgccttctctcttctcaaaagcgctttttactttatctctccattttacaatgttagttacgtctacttcaataaacgattgtacgtgtgccgaagtttgtaccgaagctaccatgtaacctgaaatcagcttacgcattctgtccatttcaacaatttcatcacctccgtttacagataccggaacggcttgctggcttttttgaaccggagctgcaggctgaactgcttttggagcttcgacaactgcttgcggagcctgagcacccgatttacgagcttcaatatattttaaaatatcttcttttgttacgcggccgtctttgcctgaacctgcaatacgctctaattcagctacagaaacaccctcttctttagcaatattttttactaatggagaaaagaatttatccgatcctgaaaaatcctgcggtgcagctacagcatctttagcaacttcgatagttttttcgatttcagtaacttctgccggagcagcagtctctactgccttaacagccggtgcatcaccttctgtttcaataattgcaatagtttgtcctacctgaaccaaatcgtctttaccgaacaattgctcaatcaaaactcctgatacctcgcttggtacttcactgtcaaccttatccgttgcaatttccagtactgcttcatcagcttcaattttgtctccaacttctttcaaccagtttgtaatagttgcttcagcgacactttctcccattttaggaagtttcaattcaaatcttgccatattgttaatctaaaaggtgattttgattttcagattgcgaaattactgaatattttgaatataaattacacttaatataattttttactcgatttttacgatttgccccctgtcattccgtgaattactcccaataataaaatttgtatttttggggaaaatcttaaaagtaatgttcttatctttaagagtttctatgattttgatacattttttgaatgaaacatactgattatccaaaataatctcaactcttttaccctcaaaaagctggcacgaatttaccattttttcttttttgaaatctaaaaagcggactttattttttagaatttcaggtaatttttcagacaaaattcgatttgaagagtaaaaaaggactctttcaggtaagggttttgattttgtttttccctcaaacatttttacaaatgaaaagaaccaaataccaatttgaatgaaaaattcaaaaaaccatgattttctgaaatgcttctgatagaaaaaattcatcgcctcctggaaacgtttcatgtatttttcgtcttttaccgtactttctcctttataatgcaaaacggtcgtttcgtgaaaatagtaattggatttctttttttgcagtgcacgatacgacaagtcaatatcatctgcatacatgaaacatttttcgtcaaaaccttctaattcaatgtacaaatcacgcgtcattaacatgaaggctcccactaaaacatcaactgtcccgctttcatttgttcctaaatgctgggcataatactgattaaacaatttccaatttggaaagatcttatacagtccgaaaattttggtaaaagctacccagggagttggaattccgcgtttgctttcgggcaaaaaagctccggtaccatcgattagtttacaacctacaatccctaaattgacttgtctgtcagcgaaattcaaaattttcttaaacgtattttcagcaacaaccgtatcgggattcagaatgcaaacgtactttccacgagcctccgccactccaatattgttcccttttggaaaaccatagttggtatcattctgaattagttttactcccggaaacttcgttttcatcatcaaacaactctcgtctgatgaattattatcaaccacaatgatttcagcatcaagtgacgaaatagcttcctgaacacttaaaacacattgttccagaaagtaacgtacattataattgagaataataaccgataattgcatgaaaaataacgaaatagattttttggaaagttataaattttcagccaatcctgatgataatgatcagtcgttttttacgaacatcaaaataggctatcaaacttctaactcgaaaaactaaaaacagggtgaaaaagtaatctgaaatattcccactgaatccgaaagaaaaacagcaacgcaattcaaaaaagtatatttttgattaaaaacttctgtatggaaatcaaaactccaattaaagttccttctttactcgtgctaacaagtatcgtttttctattaactgcctttaccctttttaaaagtccaaaagcaaatttagttcaaacttctacttggtatattgccggccctgctgttgagagtcaggaaaccataaaccaggttcggcaagaaaaaaggattgtaaaagtcacggcaaaagacaatccatcgggtgaaattgaactgaacgtcctgattactccttctgattctaatgacggtgctccgaccaatttatcagatgcttctaaatttgtgagcattacgtataaatcttctcagctcatcaaacttcaggcgcgtgaaggaaacgaagaaggaaccggctgtatacatggcggttctcaccctagagttgatttacctgcttctcctaataaattcaaaacaatcaaaattaaatggacagctttcagacaggatggtcttccaaacggaaaacttctgaacattcataatttatgcaaattcaattttgtgaattaccatccggtttcaggagcttttttagaaataaaatcagttactctttaatttaaaaaaaatatgaaaacaaagctttgtcttttactttttactgctctattcttttcaaataacagctatagccaatcgaaaaaaatcgatattaacggcgtttgggaagacattaatccgggcgtacaaaacgctgtcgcaattgtatcggaacaaaacggaaaagtaattttctcccattacctggaatggaaagggcaaaaatttgtggaaagcggcacggggaaaagaaccggaaacaccattgtttataccgtggatatcaccttacctattgagggctgggcaactcagggaacacatacgctgattttgtctgaagatggaaatacactggaaggcacttttatcgacaacaagaacagaacggggccgatttcgtttaaaagggtacgctgagcgtttgttcttgttgaaaagtttcaagtttcaggtttcaagttcaaactgcacctgaaacctgaaacttgaaacctgaaaatcctttccctctacaaatgcagctgaattttgtatttgttacagattttcatcacataaagcatgatcgtcgaaaaaactaaagaccagatgatccccggaactccttcacgaaaataacccggaataatatgaatattcaaagctttgcagaaataataaatagcccccggtaaaatgtaaatcagtaacggatttgcagcagcgggcataaagaaattactccattgggtttgttttttaacttccatcagccaaaacagaaaatagaacaaaaccgtacaaattccggctgacagcaatgtccaggcaggagtaccctgtatttttgaaattccataatattgacgaagaaaaaatccgaatgagaaaaacaatgcaatgaacccaataacaggccagttgattttcttttcgattttttgatcaaaaaacaataatgagattattattccagccgttaccaaggtggcatgtgttaaatgtccggcaataaaacgcagccactccggtaaatgtaaactttgggtcaaattagcagagtttaaagaaacacatagtattaaaaagacaatcattgcccacaacttacccgaaaccagccaataataaattactgaaataagataagcccagccaattagccccaggatcccccaccattgaggcgtcatcccaatagtaccatcagtctgaacatataaaaagtaaagtgtgatcagaactgctattccgccatactgaagtgtattttttaaccaaacaggaaagtctttcgcatatttgttccaaattggtattggcattgcaaaagctaaaaatccccaaaatgcgggtgaaataaccatttttgcagcatcgtaaccatctgatgcattgaccataaaaacaccgataataatcagagccaaagctcttttcaaagtatgtgtccaaattgttcttacgctatctcctttaatcaatcgggcattaaaagcaaacggaactgacattccgacaataaacaagaaagccggaaaaaccaaatctacaaaagtcatcgcatcagcatctgccggcatgtgtttcatccattgagggacatttacaacactggccaattcatttacaaaaatcataacaaaaattgtgattccgcgcaaagcgtctatcgaaatgatcctttgatggtataaattttcttttactttcataaatgattagatttttaggaatctcaaatataatatttttatgaaatgaccaattgtattagtttcattaaaattaatccatcacaaattcttcttatttgcatacttttgcaacatgttatccttttttaaatcaaaacctcttttaaaagatctgctgtctgatccttacgttgatattcactcacatctgttacccggaattgacgatggcgcgaaaaccataaccgataccataaagcttgtccgtgcgtttcaggaaatgggagtttcacaatttaccaccactccacatatcaatcattatgtatggaataattcggctcagattattaccgcaaaacagcaagaaactaagcttttattggaagaaaaccacattcaaattccttttcaggctgctgcagaatattttatcgatgattggtttgaaaatcattttaaaaacgaaaaacttctcactttaaaagacaattatgtactggtagagctctcctatcaaaacgctcctattcacttgtataaaactctttttgaactacaggtcgcaggatatattccggttctggcacatccggaacgttatgtatactatcgaaaagattttaatgaatatgagaaactgaagaaagtaggatgtttatttcaattaaatttattggctgtcgtagggtattatggagagcatatttgtaaaactgctgaagaacttcttagaaaaggaatgtatgatttcaccggaactgatgtccatcacatgaatcacatcagagcttttgaccagaaaataaaaaacggcaatattgttaacttaaaagaagtcattgccaacaatcagttttttaaattctagagcatactaataggcgttttcttctccatttacgatgttgatgatcgtttttataatgattttaatatccagcatcaggctccagttctcgatataccaaatgtcatattccactctgttttccatatcgactaactctttggtttcgccacgatagccattgacctgtgcccagccagtaattccgggtttggcatactgacgcactaagtaattattaatcaaatcgctgtattctttagcgagattcaccatatgaggtctcggccctacgaccgacatatctcctaagaaaacattgaaaaactgtggcagctcatcaatacttgttttgcgaataaaagaaccaaattttgtaacacggctatctcctttctcagcttgttttttatgggccaaacgattaacacgcatactcctgaatttataacacataaacgaccggttgtcgcgccccgatctttcctgcttgaaaaacacaggtcccggcgattcaattttaatgatcagcataataacaggaaagagccacggaaataccagcaagattacggaaagtgaaaaaacaacatcaaaaactttttttatcagtcggttcacagcaaactccaaaggctccgttcggaacatcaaaaccggtgtgttttcataaaacgtcacttctaccttactggactttgtatactgctgaaaatcgggaataaacttaatacgcaccatgttttgctcacaaatctgtgtcaatttattaataacctcaatttgatcaatatgcagtgccacgtacatttcgtcgacctttcttccgactacaaatttatgaatggcactaaaatcgcctaacactgaagtagcatcaataattgagtgacttctgctctcatcaaaaaaacctaaaaatttataaccgtacgtcagatcttttgcgagtatcttacgcattctttctcctgcctcgtttgctcctacaataataaatgttttaaaattatacccacgacttctgatgtactttaaaagtttcatggacaaatagcgggagatcatcagtaatccaaaaaaaatcaaataaaaagaaagcagtctgagtcttgagatctcattgtatttgagatacaccacaaaaatggaaatcaaagcagcgtgaatcactaacttcttaacagttctgaccaatattgattcgataggttctactcttacgcttctattggaatcattttgaaacaataaggctacccaaattaaaattgccagcaatgaaactgtacgttcttcttttaataaaagcttgtctaaactgccaaatcttgtcagtgcagaaagtactgttgccagatttaacaacacaacatcaacgcaaacaaataaaagcttgaaatagcgcgaaaaacgataatgcgacagtttctgtaaaatttccatatcggggatatatacttactctaagcgaaataaaaactgattaaaaatcagttaaaaaattaatagtgcaaaatagtattttaattatatttttcagcattatttaaaatctatctttaaaagtttacttttatattatgcaaatttaatattgcagaccatgattaagacttttttactcttttgcctgactgtctcttttgctaatgctcaagttttaagctgtaccgacccgctttctaaaaattacaataccgctgcgacagttaacgacggaagctgcaactataaaaaaatccacctcagccccctatattctaaactcctgagcgattcgattaaagaaacctctggattgattgctttcgataatttactctggacgcacaatgacgatcatgacaccacaatttacggattggattcagtgggtaaaattcgaaaaaaagttgttctgaaacaggttatcaatcacgactgggaagagatttcacaagacagttcttttatataccttggagatttcgggaacaactacttcggtaacagaaccgatctgaacattctaaaaatagcgaaaaaatcgttcttggaaggaaatcctgcaattgaaaaaatctcctttcaatacgccgaccaaactgatttttctgcaaaaaaaccaaacactgctaattttgactgcgaagcattcatcgtgtccaaagacagcatttatttatttaccaaacaatggaaaacatctaaaaccaacatttacgttttgtctaaccaagcgggttctcacgttgcacgactaaaacacaccttaaacacaaaaggcctggtgaccggcgcgacttatttagcgtctaaaaaaacaattgttctttgtgggtactctaaacttggcaaaccctttttgtatcttttgtacgatttcaaaaacactgattttctgtcgggaaataaacgaaggattaagctgaagctacccttccatcaaatagaaggaattgcaactcatgacggtctgcattattatttaaccaatgaatccctcattcgaaaaccgatcctttatgtaccccagcagcttcattatttcgatttgagttctgtactaagtttctaccttcataattaattcacaaataatatctctttcagtttcacaatcaatgaaaattgaaacgattgcttctctgtttaatgcgggcaaccgaaacattttgcataagaatcaaattgataggttaataaaacttcataaacaccccctgtccttccaatattagaggtattcatatcataagaaacacctaatttcaaattttcgtactgtagtcctgtaaaaaaatttatcgaagtcagtaattgattcccaatatcgttttttgacgggttagtagttactgttgctccaaaatatatattttcgaataggactgatgtacctatatcaaatcgattataacgcccttgttgcatatagtttgatgtaacaagcatcttggcttcatacggcaaaaatacgacatcgacataatccgccaatagaaatttgtaacctgagcttaaagaaaagaaagaatctaaacgtgcatttccgtttgttgtaaaagatatatcgggtctgttaagatgtttcatagacaaactaatccatagactttcggtattgaaaaccattcccgctgatacatcaaagaaattgattttatcattttttagtattggatcaattgaagtggggttaattgtacctgtttttatgtttatctgatcttcaagcaatagattttgaaaaccgaatgactttaccccaaaacctacttcaattgccggtcgaaaaacccaggtatcattatactctactttataggcatagttcccattaatttgtgtataactataatggtttacattctgtctttgatttaaaacactcaatccataaccgctgttcatattttcattccaagtattaataaaggcataatcggtatccatttttagatctaaatccggccattgttctctatgaataatacctgcgtaagtagtttctctaaacccactgaaaccgggattaagtgtttccggaattaagaaatactgtgtaaaaatgggatcctgagctcttgtttctgaaaaaaaacaacatgccaggattatgataaaaagatttaatttcatacagtactttatttaattagtgtaaatgctcctttttcggttaccgtatgattgtaaaaagtttttccggtgagcataaaataataattcccgctctgagcatccacatcttttatcttcccgttccatccactaatattttttcctgtttcagtatagacaacacctccccagttatcaaaaataatcagactaatatcctctaagccagtaaatacgggtgtaaatacatcattgtaaccgtcattgtttggagtaaaggaattcggcatcattatactatatccttttgtgatgatcaatgtggatgtatatttgtactgacatccaaaagaataagtaactgtctgtgtaacagcacgcgtcccttctcttgtataaatgtgttttggatttacttcattagaaaaattaccatccccaaactcccaagatgtatttataaaatctcccgtagctaaatttgtgaataaaattgggtcataaacagaatatgtatcataaacatctttagtatatgaaccagtagtataattggctatacccaaaacagtttttttaacattgtaaggaatagtagctgtacaaccaaaactgtcagtcacactaaacgtaatcagtccttctttatttgtattcattatttcattgttatctcctgtgacaattccatcagaccaacttaatctatatggaggaacccctccttttacatgtccgatataggtttgatttatatacttggtttcgcaattaagatctgttttaacttcgatagtaggtgttagctcttcaaatcgggtaattttccactcgccggattttttacagccattcacatcagtaacggttacctgataggttcccggcggaattttatttaaatcttcggttttggcaccattggaccactcgtatgtaaatggagctttccctcccgttacaattaaattaataatgcctgtattggcatctgcacaatctaacgggttcgaaacatctgcatttagtttcaataatgaaggttccgaaatagtaaaggtttcttttattacacatgatttagaatctgtaattgtcacgctatattttcccggtccaatattattccgttctattccggccgatggattatcatcccaaactaaagtaattggcgctttacctcctaaaagatttaagtggatataaccatcctttgcaccaaaacaggaaatgtctttaatatctggttttatactaaaaacaggggcattttctatgatcaatgatgattcttttgaacagcccaatgaatctgtaattgtaatggtataagatcctgctgataaattattttgtgtaagtccggtacccaaattactccattttacactgtagggatctccggtagtgaaaggaactcctccttttatattgtcaatactaacagaagcatttgcagaattaaaacacgatatttcggatttagtgtaattaaaaacgatttctgcattttgggttaatatgacttgcaaatgatctgtacaacctgatttatctgtaacaatcaaattataagtccctacagctaaatttttcaaattttgaagattacttgtaaagccatttggacccgtccagctataattgtaatcaaagactcccgaagatgtttcgataggtattcctccaactgtatttatttcgatttcacctgtagaatatccataacaaaaaatattcatttgtttggtcagatttacttttaatactggaggctcttcgattgtataagttcctttaagtaggttacaattgtttacttctgtaattatcacatcatatgttccaggtttgagattatctatatattcaacagtttctggataaggatttccgttttttttccactcataggtgtaaggttgtgttcctcctttaaccgatagcctgatatttccatcatttaaaccaaaacagcttatatcatttttaattgccgaaaattgaaataattccggctcagcaacgttgtaagtctttgtgaaggggcaattaccattgtcagttacgtttaaaacatagtcaccgggttttaaacccgaaatatcttcattagtacttgtaaaaccatcagggcctgtccatagaaatgcatacggatttacgtttataaaaggaatacctgcgtctacaatcagatcaatagaaccgttatttgccccaaaacaggtactattttttaccgtttcgattacttctattaatggatcgactgtaactgttattgtaaaatttgctccggtacaggcctttgacataggtgttactgtataggtcactgttgccggactgtcaatattacttactaaagtctgactaatattgtcttttggcgaggattgtgcacttgcaccacttacagatccggcaggagaaattataggttcagaccatacataagtagtccctattggtacattctctgttgtgttggtgacgggtgtaacctgaaaggtgtttttgctgcatacctttactgtctttgaacttataataggcttaagggttaaagctaccgaaaaaggaactgtttttgtagtagtcccacaactgttggttacactaaatgtaacggtataattaccactgttggcataatttactgccccgggattaagtgaggtagatgaagaaggtgtggctccggggaaactccagagatagctgatttctgaacccggagaacaattttgatctacagtcgcaacgggattaatagatatagagttacagtaatcaggaataggattcagcgtaatgacaggagttttttttacttgtatcatttctgttacagactggaaaattccacatgcgttcctagtagttagctttacatagtatgttcccggatttgcaaaattaaaaaccggattcttagacgaagcattggttccgtttacaaaattccatgctgctgatcccccacaaaattcttcactatatttgacaacttcccaattataactttcaatactacatccctgacttgcatctgtattatttgtaataataacatcttttaaaacacatgcattactgtaagtaaattgaggttgcagtaccggttcaacacaaactgtttttgtaacttccttagcggcaccgcaaggtgtttttgctgttaatttaatggtataagtgcccggtgtcgaatatatatgttctggactaccttcatttgatatgtttccgtctccaaaatcccaggtgtaaacacctgcagcaccgcaattattaccatatcctgcactagatttattgataaatattataggtgtattagaacataagatagcattaatggcaaagtctactttaggaacatctaatataataacaggacctactgtaaaagtactgcgtccgcatgttgttattatatttaagttgatcgtatttcctaaggggcaatttgcctttgtgaattgatgtaatacaggaaagtttagagaagccgaaggattcgcagaattatactgtatggaactttccatgtctttttgactgtacttctcaatggtaccgtccccaaaattaatttcatattgtgtatctgatggattagaaccccatgaaactatttcgaattccattgtatcaaccggaagacataaattagtagtattacccggagttataagagctccctttggactggtcgaattattgactatataagtaacagaattattacagccattagctcccactccggtaatcaccatcttataagatcctaattttaaataggcatgcgttttaggaaaagtaatattgttttctaaacttccgtccccccaatccacaacataggatttaatgcatgatactgaattagatatattgccaacattaatagtgtatttgggattctggctatctccacatttttcaaaagatgttcctgagttatctaagtttatgaatcttagatttggtttctgttttactgtaatcgtttttgcaatagtgcttgcttcaccattgacatcagtaacagtcaattttatggtaaaattttgagtcccgcaacctagcgcttcaaaagtatgagagggattactactgcttgaagtttttccatctccaaaattccaagaatattgaaaaggaccattaccgttaacagctgaaataaatgtaataagggtacctgaacaagagttgtcattggcgaagctaaaatcgacgccgggaggtactgaaagagtagtattagtagcaatactattcgtaaaactataaccaaaagaagtaatagctaatgaaaaatatagcattaaaaaataaagttttttcattatttttttgattatttgattaaagaaataaattaagctcataattagcattttatcttgtcattaaaaaaaccaaagcagccattcataaaatcaaaattaacaagagtacacttatttatttttttagatgcaataaccggtctttgagtgtaataatcgacatcttttaagacataactggataaatagaagtcttaaaaaaaccgttggatataaaagagtaaagggtatttttcaactgaaccagaatacggtaattccactttattcaataccagcgactaacaattgtctatcgtatttctaacaaagagaatctattcaaaagctttgacatttaaagttgctgcatcttttatgttcgaacactatttttaagctatttttttgtttgatccaaaaaggtatctttgcaccgtcaaaattaaattcctattaaaaatttagagatctaattagagacctcgttaaaatttttaataaattaaaaaagccttgttttaggcacttttacaacatgaattacctatctgtagaaaacatatccaaatcatttggcgaaaaaaccttattcgaaaacatctcttttggaatcaataaagatcaaaaaattgccttcatcgcaaaaaatggttccggaaaaacgaccattatgagcattatcaatggtttggacgaaccggatacagggcaggtcgttctgagaaaaggcattcgaatggcttttctttctcaggacaataacctacaggacgaattaactatcgaagaaagcatttttgcttccgataatgagacgcttaagattattgaagcttatgaaaaagcattagagaacccaaatgacgaagaagcttaccaaaaagcttttgacggaatggatcagcacaatgcctgggattttgaaacacaatacaagcagattttattcaaactaaaactggaggattttaaactgaaagtaaaaaatctttcaggaggacaaaagaaacgtctttcattggcgatcattttgatcaatcgccctgatttattgattctggatgaaccaaccaaccaccttgatttagaaatgatcgaatggctggaaagttattttgccaaagaaaacattaccctttttatggtaacgcacgaccgtttctttttagagcgtgtttgtaacgaaattatcgaacttgataacgggaaattataccaatacaaaggaaattactcttactatttagagaaaaaagaggagcgaattacttctgaaaatgcgagtgttgacaaggccaaaaacttattcgttaaagaattggaatggatgcgccgtcagcctaaggcaagaactacaaagtcgaaatcccgtcaggatgacttttacgtgatcaaagaaaaggcacaaagccgtcgtaaagaaaataaagtagaacttgaaattaatatggaacgtatgggaagcaaaattattgagcttcacaaactttctaaaaaattcaaagacaaagttatactcgatcattttagttttgattttcagcgtggcgagagaattggaattattggtaaaaacggaaccggaaaatctacttttctaaaccttcttacgggaacgatcccaccggacagtggacgagttgtaaaaggcgacaccatcaaaattggttattacacgcaaagcggaatcaatccgaaaccgggacaaagagttatcgatattattaaagaatacggagagtatattccgttagccaaaggcaaaattatatcggcttcacaattattggagcgttttctttttgacgccaaaaaacaatatgattacgttgacaaattaagtggtggagaattaaaacgtttgtatttatgtacggttctgattcagaatcctaactttttaattttagatgagcctacaaacgatttagatattgtaacgctaaacgttttagaaagtttccttttagattatccgggatgtttactggtagtttcgcacgaccgttatttcatggataaaattgtcgatcatttatttgttttcagaggacagggcgaaatcgaaaatttccccggaaactactctgatttcagagcctacgaagacagtgccgatgtggctcagaaagaagagaacaaggccgaaaagaaagactggaagcaaaacaatccaaccggaaatctaagtttcaacgagcagaaagaatatcagaaactggaaagagaaatcaaagatttagaaatcgaaaagactaaaatcgaacaattattctctgacggaaaagttgccgatgctgatatcgagaaaaaggcaaacgaattacaaaacatcatcaacaaaatagatcagaaagaagaacgttggttcgagctttcagctaagattgagggatagttattccgcaaagattcacaaagaagaaacgcagagctgcaccaagctttatttttcttttgtgaatctttgtttttctttgcgaatctctgtgcaacaaaaaacatagtattttttatattagcacttttattaaccccatattacattattttcctatgaaataccttttagcttcactatttgctgtaatgctttttatttcttgttcaaaagatgaaaaagaaaaggattacaccgctcaaaacgaaaaagaaattacggattatattgcaaaaaataaactaactgcacaaagaaccagcacaggactttactatgttattgatgttccgggaacaggaattcagccaacggcaaaatctaatgtaactgtagcttacagaggctcttttaccaatggaacggtattcgatcaaagtaattcagatggaatttcgttctatttagatgaagtggtaaaaggatggacagaaggcattccttattttaaaaccggtggaagtgggattcttcttgttccttcgcatttgggctatggcagcaaaggaaataataaaatccccggaggctcagtacttatttttgatgttaaattaatcaaagtaaacaaataagcttcaattaacaaaatgattctacaaagatcaattaagggctttaatttagaatcaaatactcaaacaattacacagagattcgcaaaaaaagcgagctgcagaaattttttttgcgaatctttgcatttctctgtgaatctctgcgaaacaaaaaaatgctacatacaataaaatcatatctcaaatttctttggaactctaaaaacgagcatgctgttcattccccgtttgtattccatttattgacgaaatgtttttacgacaggaaaccaaaaccggaatatttaattctaaaaaaatatcgaaaatcacttttagaaaataaaaacttcattgaagtaacagattttggagcgggttcgaaagtttttaaatccaacagcaggcaaatctcaaaaattgcttcaacagccggaatctctccaaaacgagctgaattgttatttcgcgtaaccaattattttcagcctaagaatgttttagaaattggaacatcattaggttcggcaactgcagctttggctctagggaatccaaaagcaaaagttattacattagaaggttgtccaaatacagcaaatgttgcccaaaatcaatttacggaatttgattgtttgaatgtaaattcaattgtaacagaatttgaaaactatcttcaggatattcaacggagactgaatacggaggctcaaaacttcgatttaatctatttcgacggtaatcattctaaaaaagcaactctggaatattttgagcttttattaccaacaatcaacaacgattcggtttggatctttgacgacattcattggtcagaagaaatgcaagaagcctggggaatcatccaaaatcatccaaaagtaaaagtcactatagacacttttcaatggggatttgtatttttcagatacgaacaggaaaaagaacattttgtgattcgcgtttgacaaatttcagtatacaatttttattacatttgttactatacgaagtttatatgaatgcaatcaaaattgatacccctttagaatactctatagccgtaactgaattcctttcagacaatccaaatgccaattgtgttattattgcttctgccacaggagtcaagcaaaattattatcaaaatttttcaaagtttttatctaaaaacaattactctgtttttacttttgactatggaggaattggcgattctaaacttcaacctctttctaagttttctacaacagcttcaaattgggcacaaaacgactttgaaagtgtagttaaatatgtcaaaaataaaactccaaacagcaaattattcatcataacacacagtattggcggtcagcttattggcttagttccttcgaataatttatttgatggtattataatggtggcatcacaatccggaagctggatacactggaaaggatttgaccgattaaaaatgcagtttttgtggtatgcaattataccgtctcttactaaattcttcaattatctcccttccagtcacttcacccgaatggaagatctaccaaaaggaatggcgattgaatgggccaaatggtgcaagaaacccaactaccattttgactgcatcgaaaatgcaaaagaacattacgataaaataaactgcagcattaaatcctatagtatcgacaacgatttttatgccactgtatcggcaattgattggattgcttccaaatttaaaaaatctgaagtaagcagaattcatttaaaagcagaagaatttggcgtaaaagacataggtcatttcggttttttcagaagtcagtttaaagatacgatctggcctatttttttagaagatttaaaaagatttcaatctcaataatttacaaaatagtagataaaaaaaatggcaaccatttctggctgccatttttttactaattcaaaattttaaaacttacttcttagccgctgccgtttcttcagacttcgcccccattctgtttaaagtatacattggcgcaaattttaatttcaaaccggcaattttacgattgtcttcgcctgttaagccttctttttctactgtattttttcggctgtcaagtgcttcatacatcaatttaatttcgtcccagtcttcacgggagtaactgtctttatttttttctaccgtatgcacaaactgttggtagacactatgaatgtttttagcattcacccaggcaaaactcatatcttctccaatttttccttcaccaaataaagcattacgcaattgctgttttggacttggggccggaggagcaagaatagtcaccatattatttctaaattcttcgtatttgatcttactcgtatttattttctctgtcgcggcattattttctttaatatcagcaagtgccagttgagcattcgcagctcttttttcatactcggcttcaaccgctttccaatcagtctttaaatcatcagccttaacatttttaacagaatcgacataggcaacataagaatcgattgttttttcggcctgttcttgtttttcatctttacaggatacaaaacctaatgcgattaccgcaattccggataataatgatatacttttcataatcttagttgttttagttaccatcttaacaaatctacctaaaacctaacctaaaaaattacacaattatcatcttttaaacattaaaaatatattaaaactataaaatacaaaatttgatgttaattatgtaaaatttaccaaaaacaacataacgctcttctgtcgaaaaaagataagttttttgattattttcagatgaataaaaacaaaagacaatttgtaacaaaaaccaaatctcgactactcatacttttattgaaaagtcttttgtacatttaaatccaaaattgtaaatcgaaatggcaaatccattaattaaaataaccaacatcaaacgagatttcgttctgggtaatgaaattgtttatgttttaaaaggaatcgacctgcaaatcaacaaaggggaatatgtggctttaatgggcccatccggatccggaaaatcaactttaatgaatttactgggttgtttggatacgccaacttccggacaatacgtattgaatggaaaagatgtcagtcaaatgcgtgatgatgaactggctgaaattcgaaacaaagaaattggttttgtatttcagaccttcaatctgctgcctagaactacagccttagacaatgttgccttgcctatgatttatgccggttactccaaaacagaacgtgttaaaagagccgaagaagttttaaagcaggtaaatcttgccgaccgaatggaccatcagcccaaccagctatcaggaggacagcgtcagcgtgttgccattgcacgagctttggtcaataaaccctctattattcttgccgatgagccaaccggaaacttagacagtaaaacttctgtggagatcatgaaactctttggtgacattcacgaacagggaaacaccgtaattctggtaacacacgaggaagacattgcagcctatgcacatcgtgtaatacgcttaagagacggattaatcgaaagtgacacccaaaaagaagttaaatcgtttagttgattaatcgtttaatcgcaaagaaaagcctttgaacctttgcaccttagaatcttagcacctcaaaaaaaaatgaaagtatatacaaaaacaggagacaaaggaactactgctctgtttggcggtgaccgtgttcccaaagaccatatccgaattgacagttacggtactgtagacgaactaaactcttatatagggcttattcgtgatcaggaaatggatgcacattataaaactattttaattgaaattcaggatcgtctgtttaccgttggtgccattttggctactccggcagaaaaagaggttcttaaaaatggggaacttcgtctaaaaaaccttggaattatcgataccgatatcgaattattagagaatgaaatagaccaaatggaagaaagtcttccacaaatgactcattttgttttacctggaggacatcctactgtgtcacattgtcatatagcacgttgtatttgtcgtcgcgccgagcgtttggcagtacatttaagccataatgaagctgttcctgaaatcgcaattcgatacttaaaccgactttctgactacctttttgtcttggcacggaagttgtcctcagatttaaacgcggaggaagtgaaatggattccaaggaagtaattttagattgatgattaacgatttttgattttagatattcgcacattttgagcattcttaaatctaaaatcaacaatctaaaatctgcaatcagcaagacgttcttaaattttattaaaataaatcaaattttacttgtctttttcagtaaaaaatttatttttgcacaaaactaaacagataacagatgtattggacattagaattagcatcttatttaagtgatgcgccatggcctgctaacaaagatgaacttattgactacgctattagagctggtgctccattagaagtggtagaaaaccttcagtcgattgaagacgaaggcgagatatatgaatcaatggaagaaatttggcctgattatccaacagacgaagattatctttggaatgaggatgaatattaaaaaataaaccaaaggaaaaagtctcatcaccgaggctttttttttggttcaaatacacatttacataaaatagaaatacaataaatcatgagtttcataaacagtattattaaagtctttgtaggtgataaatcacagaaagatgtcaaagctttacagccttacttaaacaaaattaaaacattcgaaaccagcctaatgagtttgtctcacgacgaattaagggccagaactgtattttttaaggaaagaataaaagaagccagagctgataaagatgctaaaattgcttcgcttaaagcagaagtagaaaacatcgaagacatcgacaaaagagaagatctttatgatgcgattgatactcttgaaaaagaagcttacgaaatctcagaaaaaactttattggaaatccttcctgaagctttctctgtggtaaaagaaactgcaagacgtttcaaagaaaattctcatattgaagttaccgcaactgcaaaagaccgcgaattttcggcaacaaaaccatacgttgttatagatggcgaaaaatctgtctgggctaacaaatggaatgctgccggaaaagacatcacctgggatatgattcactatgatgttcagttaattggtggtatggtgttgcacgaaggtaaagttgccgagatgcaaacaggggaaggtaaaactttagtagctacacttccattatacttaaatgccttgaccgggaacggagttcacttagtaactgtgaatgattaccttgccaaacgtgatagtacatggaaagcccctttatttgaattccacggtttaactgttgattgtatcgataatcaccagccaagtacggaacaaagaaagaaagcatacgacgccgatatcacttacggaaccaataacgaatttggttttgactatttaagagataacatggcacattcgccaagcgatttagtacaaagaaaacacaactatgctattgtcgatgaggtcgattctgtattgattgatgacgccagaacaccacttattatttcaggaccggtgcctcagggagaccgtcatgaatttaatgagctgaaaccaaaaatcgaaaacttagtagcacaacaacgtcagttggcaaacggtttcttagcagaagcaaaaaaattaatcaaagaaggaaacactaaagaaggtggattcttattgttaagagcttacagaagtttacctaaaaataaagcattaattaaatttttgagtgaagaaggaatcaaacaattgcttcaaaaaaccgaaaatcaatacatgcaggacaacaatcgcgaaatgcataaagtggatgaagctttgtattttgtaattgaagaaaaaaacaatcaggttgaattgacagataatggtatccaatacctttcgggagatactgatcctgactttttcgtacttccagatatcggaactgaaattgccgctatcgaaaagcaaaaactagacaaagatggtgaagcagaagcaaaagaaagattattccaggattttggagtaaaaagcgaacgtatccatactcttactcaacttttaaaagcctacgctctttttgaaaaagatgtagagtatgtgatcatggacaacaaaattatgattgtcgatgagcaaacaggccgtatcatggatggccgtcgttattctgacggtttacaccaggcgatcgaagctaaagaaaatgtaaaaatcgaagctgctacacaaacttttgcaactgttacattacagaattatttcagaatgtacagtaaattaggtggtatgaccggtacagctgttacagaagctggcgagttatggcagatttacaaattagacgttgttgaaattccaaccaaccgtccgattgcgagacaagataaagaagactatatctacaaaacaacacgtgaaaaattcaatgctgtaattgaagacgtaactgaattatcaaatgcaggaagacctgttcttattggaacaacttctgtagagatttcagagttattaagccgtatgttgaaaatgagaggcgttacacataacgttttgaatgctaaaatgcacaaacaagaggcacaaattgtagaagaagcaggaaaagccggagtagtaacgattgcaaccaacatggctggtcgtggtaccgatattaaattaactccagaagtaaaagctgccggaggtttagccatcgtgggtacagagcgtcatgactctcgtcgtgtagacagacagttacgtggtcgtgcaggacgtcagggagatccgggaagttctcagttttatgtttcacttgaagataacctaatgcgtttatttggttctgaaagagtagctaaagtgatggacagaatgggacttcaggaaggcgaagtaattcagcattctatgatgacgaaatctatcgagcgtgcacagaaaaaagtagaagaaaataactttggtgttcgtaaacgtttattagaatatgatgacgtaatgaactctcaacgtgaagtagtatacaaacgtcgtcgtcatgctttgtttggtgaacgtttgaaactggatatcgcaaacatgctttacgatacttgtgaactaatcgtaagtcagaataaagtagctaatgatttcaaaactttcgaatttgatctgatccgttatttctctatcacttctccaatttctgaagctgattttacgaaattatcagacatcgaaattacaggaaaaatatacaaagagactttggctttctatactgaaaaaacagaaagaagcgccagagaagctttcccaatcattaaaggagtttacgaagagccaaacaatcattttgagcgtatcgtagttccatttacagacggtatcaaaacactgaatgtggtaaccgacttgaaaaaagcatacgacagcgaaggagctcagttaattgccgatttcgagaaaaacattactctttctatcgttgatgaggcctggaaaaaacatttacgcaaaatggacgaattgaaacaatcagttcaattggccgttcacgagcaaaaagatccattgcttatttacaaattagaagctttcaatttgttcagaggaatgttagacaacgttaacagagaagttatttcattcttgttcaaaggtgatttaccggctcaaaacgttcctgaaattcacgaagctaaagaagtacgtcaaaaagaaaacttcaaattaagcaaagacgaaatcgtaaacagcgaggaaatcaaccgtgaagccggagaaacacaacagcgtcaggttacagaaacgattgtaagagatatgccaaaaatcaatcgtaatgatactgtaactgttcaggaagttgcaaccggcaaaacagaaacaatgaaatttaaaaaagcggaatctttagtagcctcaggcgaatggattatcgttaaataataaagacttttaattaagctaacccgacaggtttcaaaaaacctgtcgggtttgttgtttttaacaaacccgacaggaaatctattcagattttcttatatttgtaaaactaaaactacttaacaatgacagcaattttaaatttatttaaaaaatccgattcaaaagatactggattaagaggaactgcagagggtaggttatatgttgataaaaaagttttttacaaccgtacagaagtacgagaagctataaaaaaccttaaaaaatctactgcaattaaagagcagatagaagcaaatagaatctaaatatgatgccgtacaatctacttttacttcctgtaattgttggttattttattttaatatattcccattacttcagatataacactcaaagattaacacaaaatagaatcatttttgaatcagtttctgttgccataattatattaaccttgggatttctattaagaactgtaattgaatatttatcccctcaattaacagtataaattggtttttataggtaagaaagatggatttttgactcaagataatgatattcatagttttataaagaataataatctacaaaaagatattacatttacgggttatgtaaatgattctgagattccgcatatctatcataatgcaaatctatttgtatttccttcactctatgaaggttttgggttacccattcttgaggcacttgcaactggaacaaaagtgttaagttcaaatgcagcaagtttaccggaaataggtggagaagcggtcgtttattttgatccaaaggacgatgtcggattaggaaaattgatacaggatactattgtagactcatcaaaaggtaaatttttgtccgctgaggcacataaacagttagagaaatttacgtgggaaaaatcgattaaaaagcatctaaatgctttcaaaaagttagaatgaagcagttaattttacaatataacaaatcggtcgtctatttttttttaatagcagtagcactctttcctattttaccaaaaggagtggaaagcattttaatgtttggtggatttttattttcattgtcttattttattttcgaaggaaaaaaattctggagcaaagaaaaaacaatagagcttttattattctcctctctatttctaatttttgttttttcattgttttataccattgatattaagacagggactaaatttataatacgacttttaccttctgttttatttcctgcaattttcctgtttaataacacagatcttttgaatgctaagaaatttcaagtaattacaaatgtttattgcttggctgtgggcttaattttgtttttcttgcacataacgttgtttcatgaattatacaattcaagtttaaagttttgggattttagacaacttatcgaaagcaaaatagaagtacatggaacttatttggcaatgtggattggttttgcgataattattttagtgtataaaattagaattgaatcaaaaaagtattttatcattttcatatttttatttatggtaggatattttttctattggcaatacatcatcggatccagaatgccttttgtggcaaccattatagtttgctttttttgtttgtctaagaacgtaatacaagtgacaattgccagtgtcttgttaattagtttgacgtttattttagtctttaaagtagatcgaataggagaaagatttgaaaaactaaaaaattacaaactctcttttccagaagggaaatatgaagacaattatcctaatattagtaatgaacagattagaaacggaatttatttttgtggttatgaaatctcaaaagcagaaccaattgtaggttatggagtaggagatgttgatgccaaattgcaatcttgttatgatgaaaaatatagaaatacagatacttataaagttaccagctataattcgcacaatgaatatttaaacataattttgtcttcgggaattttagggcttgttttatttttattttcacagtatcttcttttaaaacgagcatttcatcataaattagggatttatatttcatttgtattttttattttccttaatttttcttttgagaatattttaagcagacacgatggagttatcttttttggattttttaattctttattattttttcaaaagaacaatttaaatgaaaaaagcattaattagcgattggtattatgtaaatggaggtgctgaaaaagtaatacattccataaattcaatttgggatgattttgatcacttcgcactgattgattttttaaaggatgaagaccgaaagtttattttgaatggaaaaaaagtgaaaaccagttttattcaaaaattaccaacggtaaagaaaaaccatcgtaaatttttgcagttatttccaatagccatagagcggtttgatttgagtgattacgacttaataattagttcttcatcagctgtagcgaaaggagttcggacccgaaaagatcagcttcatatttgttattgtcattcgcctatgcgatatgcatgggatttgcaggatcagtacttaaaagattcaggcttagataaaggtttaaagggattttacgcaaaatatgttttgcagaaaataagaaaatgggatgtctcaaactctgaaaatgtcgattattttattgccaattctaactatatagcagaaagaataaagaaaatttacaaccgtgaatcaacagtcatttatcctcccgtcgatgttgaattttttagtttagaagaacagaaggataattattattttacagcttcgcgtttagtttcttataaaaaaacacaattaatagtagaagcttttaatgaattaccacatctaaaattaattgttgccggggacggaccggaatttcaaaaacttcagacaattgctaaaagtaatattgagtttgttggatttgtagaagccaatagtttaaaaaactacatgcaaaaggcaaaagcgtttgtttttgccgccgaagaagattttggaattattccggttgaagcacaggcctgtggtactccggttatcgctttagcaaaaggcggcactttagaaacagttgttgaaaataggacaggagttttttttcaggaacaatcatcacaaagtataaaagaagctgtgattgactttgaaaagatagaatttaacccgaaagtaatccgtgaacatgcgatgaagttctcgaagcaacgttttgaaagtgaaatgagagcttttggtaaggagaagctagcagaaaaattttaatggtttgaaaagaaattttacttcctatttttataaaacatagcagattaatcttaggtactttttttaagaatgctaaatcagttacatttgcgaggtataaataattactatgaaaagaatacttattacaggagcggcgggatttttgggatcgcatttatgtgatcgttttatcaaagaaggatattatgttatcggaatggataatttgattaccggagatcttaaaaacatagagcatttattcaagttagaacatttcgaattttaccaccacgacatcaccaagtttgtgcacattccaggtgatttagattatatactacattttgcctcgccggcaagtccgattgattatttaaaaattccgattcagaccttaaaagttggatctcttgggacacataatttattgggattagctcgtgtgaaaaaagcaagaattttaattgcatcaacatccgaagtttacggagatcctctggttcacccacaaaccgaagagtactatggaaacgtaaacaccattggtccccgtggagtttatgatgaagccaaacgctttcaggaatcgattactatggcctaccatacttttcatggggtagaaaccagaatcgtgcgtatttttaacacctatggtccaagaatgcgtctgaacgacgggcgtgtaattccggcctttatcggacaggcattgcgcggggaagatttaaccatttttggagacggaatgcaaacgcgttctttctgctatgtagacgatcaggtcgaaggtattttcagacttttgcattcagattatgtatatcccgtaaatattggaaatccggatgaaattacaattaaggattttgcagaagagatcattaaattaacaggaacgaatcaaaaggtagtctaccatccattacctataaatgatccgttacaacgccagccagacaccacaaaagcgaaagagttattgggttgggaagcaaaagtaagccgttctgaaggaatgaaaattacgtatgactatttcagatcactttcaaaagaagagctttcaaaggaagaacacaaagatttttcgaactatatcaaataagaaaatttaaacgggcaattattctggaaataattgcccgttttttattaagttacttaaaaagcattcttttcgatgagttccttcatttgctggtccaaattaaaatgacttttggcatgaagaaaaatagcctttttcatcttctgtatctctgctttacctagtgtcgagattgttcctaaagttgtatttaattgttggaaatcttcaacggggactacccaaccaaggttattttcttctacaatattttctccttcacctccaccatagtaaagtattggaaatcctaaagcactatactcaaatattttggacggaacagatccgtagattcttgtcttgagcggaacaagggcaatatctaaatttttcaaagtttcatgcaaaacgtttcgttctaacattccgtgaaaaacaatttttttagttggattttggttgaggtaattcacaatctgagttttctcggcaccatcaccaaaaatatgcagttcgatgttgtcattttctaaattcaattgctgaataagttcaaaaaccccttgagcaacacctagtaatccggcgtagaatagtttaataggttcacttgaattgtctttttcttcgaggagatcttccacaaaatgatccggataattacgatatagaaaacattttttttcgggaaagacggaatgaatatgggtaatgatttcattagattgcccaaaaatatgcgttgctttttggtaaataaaacgttcaataaaaagcaaaatccggtgtgaaatactgtttttctttaatacttgcagttcgatagcggcagttggccaaagatctgaaacattcaaaaggattgttttactcttaatccaaagcacaaaaacagaaacaaacgaaagtaatagtggaggagattgtacaattacttttttaggtgttttggcaaacaataaataaaaaaacaaagtactggaaaacgacaatgtcgagacaattcgtttaaagatgttcgaactattactcggatagatccaaagtcgttttaaggtaatattctggattttttcggtaacagaaaaccggcctttgtattccggaaataactcgccttttggataatttggaagaggagaaattaccgaaacttcataaccattttgatccaattttaaagccagttgttctattctattggccgctgcacctttttcgggtggataatagtttgatatgattagaatatccttcattattttttagccaataaaattgaaataattcgttcagatgcttttccatcccataaatccggaacaccacttttcttgggaccattttttaaaaatgaaccgtatactttttgtaaattttctaatgacgttccaacaatagtatttgaaccaatggtctcggtttcaggacgctcagtattatttcgcatggtaaaacaaggaattcccattacagttgtttcctcagaaataccaccgctatccgtaataacggcaaaactgttttgtattaaatacatgaaattcaggtagctttgtggagcaacaaagaggatatttttaaacttagctgagctttcacttaagatagcctgtgttctgggatgaataggaaacaatatttttttgttatttgccaaatcatcaattccatgtagtaaagcaataagagaagaaacttcatctacatttcccggacgatgtaaggttagaacaatgtagtttttttcactaagctgatgttcttcccaaaaatccggagccgaaattctattgatgttttggtataaagtatcgatcataacatttcctacaaaatgcacgttttcaggatttgatcctagttttaataaattttctgaggcggatttggaggtcgtaaaaaagtaatccgtaatgctgtctgtcagcattctattgatttcttccggcattgttaaatctccggaacgaattcccgcttcaacgtgtgctactcttgtatgacattttttagccacaatcgaacaagccatcgtcgagtttacgtcgccaacaaccaaaactaaatcagttggattttgaagtaattctttctcaaaagcaatcataattgcggcagtttgttcggcctgagagccgctttttacttccagatttacatttggttttggaatatttaattcttcgaaaaaggtatcacttaagtttttatcgtaatgctgccctgtgtgaaccaaacgaaaggaaacatcaaaaccttgattttgcttgtcttttatagcattaataaggggtgctatttttataaaattaggtcttgcacctgcgattagggtgattttcatgggactattagattctttctaaaaacattctttcggcaaaagtaaagtttaaattggaatttaatcagaatggaataatttcttaaataatgaactgtgaatttgcttattttttataactaattttcactctttcatttccgtcttcttttttctccgttaattcatctaaataggaaaaaaccaattcgatatttttatcctgattttctaacttcttttgaatctgaagaatatccactttaatttcagctgtatccagcagcatttctctcactttggtgaaaatgcgcatgatctgaatattggtttgaatggctttatcgctttttagaacgctagataacatcattaccccatgttcagtgaaaacaaaaggtaattttctgcttccgccccaacttgaagtcgcaatttgcgacttcaagttttcaaattcgttttcagtaagttgaaacatgaaatctttaggaaagcgagataaatttctttttacctgttcatttaatctttttgtttccacatcataaagcagcgccaaatcactatccaacatcactttttgattgcggatataatatattttattagaaatagtttcttcagaaagtaaagattgatcttccataagttttcattaaaaaaaacaaatgtaagattttatttatatttaaagacaagatttgaattgttttaattttccacttttacttctgtctaaaactgtttttcgggtaaagctgaaagttagattaggttctaaatataccgtaattgccttttctattttttcaatttgagatgcatttaattcaatatcacttacatactcgatttcaaaagaatctaattgcatttgtttgataataaattctttaacgtttccatcgtcttcaataatgcttttggttacataataaaaggttaagcccggtgctttttttccgcttggtaagagagcaatatcattggtccttccaataagtttttttagaatgggtttctgcggagtacttttttcatccagaattccgatatcgccaatatcatatctgataaagggatgtgccttattgaacaaagatgtaatcacaatcctgccttcttttccatagggaagaatctgattgttttcatctaaaatttctacaaaaagtgtttctgaattgacctgccattcgccttttaagttttcaaaagcaatcaaatcgagttctgaagcgccgtattcattgataactggaattccgaattgtttttctaaaagttttttatcggattcgaaaagcatttccgaagtaacaaaacaagcttttaaagagggacaaacttcttttaagataagatttttttgctctaaatacttagcaaataaaacaatcgaactcgtgtaaccgttgatataatcaaattttttagttttgaatttttgcaaaaacttttccagaacgccatcagataaatcgaaaaccggaaatcggaaacgatgagtcagaaaatctttaattcgttctttataatatcctgtaaaattcatcggaataccatagaatcgagcctgatacgagcgattaaaatcgatatcgtaccagccaaaacgcataaaaatggaagtccaggtcagggaatggcaatgtttatctttggcaaaaacaaaaggagttccactggatccggaagttttgttgaggtacacattttttaaggtgtagccttttgaaagcctttcttccagtggtttttgtaaattttgtttgttaaggatgggtaaattttcccattccaatttagtattacctccagccaattcctgatagaaagaattgtttttcaaatgaaaagctacgatttcttcttttctgttctgaagaaaatgtgtatactgttcttccgataaatttcggatttcatccaattgcgttttggctttctttatcggaaaaccatttaattgcagcgaaatatcgaaaagagaaatcatttgaagagctaattttcgtcaaaaataatactatcaaattactaacagagaacaatcaacaactttttaagatttaattattttttacgtgtaaaagcaattatttttgcaccacaactaaatacaactacaccatgacaattttactattgggatcgggcggaagagaacatgcttttgcctggaaaatgactcagagtccgctttgcgaaaaactttttgttgcacctggaaatgctggaacgtcggcaattgctacaaatgttgcaatgtctccaacagattttgatgcaatcaaagcatttgtaattcaggagaatgtaaaaatggtagtcgtaggcccggaagatcctttggttaaagggatttacgattattttaaaaacgacgagagcttacaacatattccggttattgggccatcaaaattgggagctcagttagaaggaagtaaagagtttgctaaagagtttttaatgaaacataatattccaactgctgcttacgacagttttacggctgaaacggtagagaacggatgtgcttttttagaaacattacaacctccatacgttttaaaggctgatggtttggctgcaggaaagggagttttgattattcaggatttagaagaagctaaaacagaattgagaaacatgctggttcacgaaaaattcggagcagcgagttcaaaagtggtaatcgaagaatttttggacggaattgaattaagctgttttgttttgactgatgggaaaagctataaaatccttccaacagcaaaagattacaaacgtattggtgaaggcgatacaggtttaaatacaggtggaatgggagctgtttctccggttccttatgttgacgctgttttgatggaaaaaattgaaacacgtatcgtaaaaccaactatcgaaggatttcagaaggatggaattgagtataaaggattcgtatttattggtttgatcaatgtaaaaaatgaaccgattgtaattgagtacaacgtaagaatgggagatcctgagactgaagtggtagtaccgagattagaatctgatttagtggaattgtttctttcggtagccaatcaaaaattagatacattcgaattaaaagttgatccaagaagtgcaactaccattatggtggtttctggtggatatcctgaagaatttgaaaaaggaaaagtaattagcggtttagaaaatattgaagattctattgtttttcatgcaggtacaaaattagaaaacgatagtatcgtgagtaatggaggacgtgtattaacggtaacttcttatggagacgatttccaacaggccataaaaaaatcttatcaaaacatagataaactaagctttgataagatgtattttagaaaagatatcggcttcgacttactttaaaaaagagtgagccgtagtatcttggttttctgttccggcatcatcaaaaatgcgtaattgtttaatccaataaacgattgcgcatgaacagatgatcataaaaatccagttgatagtattagcaccaaaccatgtaacaagttccaaacgacgtaaaaaatcaagcggtgcgaataaaatgttaacgaataagtactgtattccttcaaaaaaagctgtcataattttataaaattatatgttatttattgttgtgtaacgcattgaaaccagaagtctgttagcagaatcttttttcaacttgttgtttttcctttttaaacaagtattatatttacaatcacaaaagtataaaatatccttatgataacaagtgtttttaaaaaatctacaccattaaattattcattggtcgtaattttaatactggttttcttttttttgtttcaaattcaggaaccttcctggataacatcttattttttggcattccaaaaagtgagcttgttgtgctttattttggcctcatttttcctgataaattttatcgtaaaaaagaacggactcagtaaagacaatggatacgcgatatttttttacttattgtttctattgtttttccccacaatattcaacaattccaatgtaatatatggtaacttttttatacttctggcacttcgaagattgatttcgctgcagtcgttgaaagcttctaaagaaaaaatatttgatgcatcattttggattttaatagcttctttgtttcaattttggtgtattcttttcctgattttagtttttatctcgatagttttccatgtttccagagattatagaaactggattttaccttttatagcacttgtggcagtgtccataatctttttattggtctctttaattttccatatcgacatcacagatttttttcaggaacgtgccgtaatcgattttaatattgattattttaagagcaattatgaaaatggagcactttcaatctatgtggctgtagccttattttttgtagtttcgatgctgaccacattatcaaatcgaccacaaatagtgcattcttcatacaaaaaagtagtagcttgtttctttattgcagcctttgtttatattctatcgccggataaaagtaacgatttgctcttttttagtgttgcgcctttgacgatcatggcagcaagtcatgtagagtatatgcaacaaaaactcaataacgaaattgttttttatgtattgattttgtgcagtttatttacatttttttctcaattataatttacttccataagcaagatctccggcatcgccaagacccggaacgatataatttttttcatttagcttttcgtctaaagaagcgacccataaatgacagttttccggaagattttcttccagaaaagcaacaccctctggcgcagcaataactacaacaatatgaatctcttttggagtggcattttgaattagcttttcgtgaacagcaacaatcgactgacccgttgccaacattggatcaagaagtaaaacagtcttgtcgtttatgtttgaaacagcttggtattcaacccgaatttcgaattcggcatcgttatttggatggtatcggcaagccgaaacaaaactattctcggcatggtcaaagtaatttaaaaaaccgttatgcaacggtaaaccagctcttaaaatggaacataaaactaaatcactctctatttcagtcgtatttttaatgccaagcggagtttgaatttcaacatttttataagccagatccttactcagttcataagccataatttcgccaattcgttcaatatttcttcggaaacgcatgctgtcgttctgaacattaacatttctgatttggcctaaaaagtgatttaatacgctgttatttttggagatataatgaattttcatactgaatttttagaattatggatagattgtagtgcaataacgaaaaattaatcgttttcttcacaccataaaagtataaaaagtatctttgtgtctctaataaataaagacatgttttcaaaattagcatattctgttttcgaacaaagcatcaaagattatcaccaatttgataatgttgatcaacctataaacaatccttacccaaaggataagtttgagcatttattgtatttaaaaaactggattgacactgttcaatggcattttgaggatattatccgtgatccgcaaattgatccggtagcggcgctgactttaaaaagaagaattgatgcctcaaaccaggaacgtacagatatggtggaatacattgacagctactttttgcaaaaatacagcgatgtaaaagtaaaagatggtgcaaaaatcaattccgaaagtcctgcatgggcttttgatagattgtctattttagcgttaaaaatttatcacatgcatgaagaagctactcgtgctgaagcttcacaagagcacagagataaatgtcaggagaaattaaatgtacttttagaacaaagaagtgacttatcgactgcaattgatgatttattgactgacattgaaaatggagataaattcatgaaagtgtacaaacaaatgaaaatgtacaatgacgatgaattgaatcctgttttatatcaaaataaaaaataaatttttagattaatttttgtctatgataacaattgaaacattaaaaaagctcaaagagtcagaagacaaagttgaatttaaaaaaggtgaaggaggtaatatatcctatgatggtggttctaaaccaaaaccgagcgatagacgaaggtgtattttaggatatattactgctttatgtaatgaaggtggaggatatttagttattggaatgactgataattatccacatgaagtagtgggcactcagcagaatttgggatcaataggtgaacttgaatctaaagtatataccgatacaggaattcgtccaaaaatatatgaactctatgaaggttctaaaagagtattagtaatagaagtgccatgtagaccagctggaaaggtttttaaatttgaagatgttgctttaatgagagttggtgaagaattgaaaccaatgtcagatgaagtttatttaaaaattgttcaggaacaagaacctgatttttcacagcaaatatgcgaaggtttaacaatttctgatttggatgacaaagccacgttattgctgaaagaaaaatattctattaaacaaaacaatccacagtttaagttattaccaaacgaacagattctttctgatctcgatcttttaaaaaaaggtaagctaactaatgccgcattaattctgttagcaaaaaaagaaacgttacaagaaaggctgccacaagctaaagtaatgttagaatatagaaattcggaaagccaaattcctttcgacaacagaatagaatttgtagaacctttttttattttaatagatgaattatggaaaactattaatttaagaaatggtagttttcctattcaggatggcgcatatatttttaatattccttactttaatgaagaagtaattcgtgaatctattaataacgcaatttcacatcgtgattataagagaacttcagaaattgtaattaaacagtttccccatagacttgatgttattaatgctggtggttttcctgcaggagtgactctagataatttaataaaaataccaagcaccccaagaaatagattattggcagatattttgcaaaaaacaggaattgttgaacgttcaggacaaggagttgacaagatatattataatactctttctgaaggtaaagcagaacctgactattcaaaatcggataactttcaagtaaatctcaaactttctgcaataatagaagatcgtgcctttgctttatttattgattcaatacaaaaagagcttcctgaaagtgaaaggctttcagttcttgaaatagttactttgaataaaattaaaaatggtattcaaaaaagtgaactcgatttagaacaaataaatcagcttttacagaaaaagctgattgagaagaggggtaagactaatgcaatcttttatatcttatctaaagattactatgattttacggatgaaaaagcaaaatattatagcctgcaagagatagatgatgatcaggttttgggtacaattttacagtttttaagaaaagaagaaaaggcaaaaatgaaagactttgtaggtctttttgaaaataaattatccagaaagcaagtaagatttcgagtggataaattagtttcaaacaaaattcttgaacaagaaggtgaaggttctggttcaacatataaattaagtcaagaatatataaaagagatacaagtaatatctgaagcattaaatataggcatgaaagaaatgaataaaaaacgtaataaaagcatagaaatggccaaagaaaggccaaagaaaagtcgttaaattgttgaaaaccattcttttttgttcataagtatgctttaaagtattgatttataagtgcttttttcaaactgaaatggccaaagaatggccaaaaaacactacttttttaaaatatttcaccactttttaattttaaatcgagaaaaattgtccaatacaataaagcatatagccgtcatgagactatccgcaatgggagatgtagccatgatggttcctgttttacgcacttttgtgaagcagtatccaacggttaaaatcaccgttatttcacgaccgttttttaaaccattttttgaaggaatcccgaatcttgagttttttgcttttgatgaaaagcagcgtcacaaaggatttgcagggctacttagattatacagtgatgtaaaaaaactcaaaatcgatgcttttgcagaccttcataatgttctgagatccaaaattgtaagtctcctttttgctttaagcggaaaaaaaagagccacagtggacaaaggacgtgaaggtaaaaaagaattaacccgtgccgagaataaaatttttgcacaattgccaaccatgtttgaaaggcatgcaaaagtatttgaaaaacttggttttcctttagacatatcaaatcctgaattcccgcaaaaagcaaaattaagcccggatattttagaaattattggcgatcagaatcaaaaattaattgggattgcacccttcgcacaatacaattccaaagtatatccacaagatttaatgcaggaagtaattgcaaaattgacggaaaataaaacgtataccattttactttttggtggaggaaagaaagaaattgaaatcctggattcgtttgcacaatcctttgaaaatgtagttaatgtggctggaaaaattaaatttcaacaggaattacaactcattagtaatttagacgtaatgctttctatggattccggaaatgcacatattgcggcaatgcagggagtaaaagtcattacactttggggtgctacacatccgtatgcgggatttttaccattcggacaaacaatggaaaatgctttggtttcggacagaaatcaatatcctaaattaccaacatctgtttatggaaacaaaatcgttgaaggttatgaagacgctatgagatcgatttcgcccgaagatatagtcaagaagattcaattaagcatataatccatttaaatcataaagaaagtagccaactgttttctttttgtttttattagcaacgattacaacaaaatgattttctttttctgtagacaataaaatgtgctcaaaatcttccgttgaatttctgtagattttgtgcaccaattgtgactctttaattttgttcgatagtattttagccgcttttaatttgcttatgtagggccagatattaaaagtattcttctcagaaacatttatttcagtcattttaccaatcattgttgcactatatttttctttggtaagcaatttgggaccttttttattttgttgtttcttaattataaagtagatacaaaaaagaactgttattacaaaaagtgctataaatgataaacgaagtaagtgatgtattgtcataatatttaagatttaaacgtgttgacaaattcgatttagcgctacatatctacacaaaaacatatgagattgtgattgctataattttacctctaatataataaaaattcagcaatattttatcgaaaaaatgcttttattgtaattgtaattagagccaaattttttcatcccggcatctgctataaatataactttttagattcgaaattgtgacttgataatttggtgcttcataaccaaatcgttcgtgttccatttgttctttttcgacagcatcgcagccttttataacttctttaagcatatccagcatggcgagttctttattgtttgtcttctgaaatttaaattctataagttcatcctgaagttcttcacaatattccacaagtttttcaacttcaggttcctctagaagatattctttatttttaaaaatttcctgtacagatttcataacgtaaattttaagttccaaattcaaattttacaaagattgctaataattataaaacaaaaaaaattccaaatcccaattgtaagtttgggatttggaatttgaatattttgagattttaacgattaaacatcatcataatctacataaatagactctgaagtaggatgtgcctggcaggttaaaattaaaccttcagcaatttcgctatccgttaaaatcgagtttttagtcatttcagcacttccggaagttacacgagccagacagctgctgcaaattcctccctgacaagagtatggcgcgtcgattccttgttttaaagcggcatcaaggatggtttgcttttgagacatttcgaatgtaacttcgtcatcatcaaccaaaaccgtaatttttgtatgtccttctaaggaagtattgattttattttcctgagtagaagaagtaaaaagttcaaatttaattgcggattcttttacattcttttcctttaaaattgccgaaaccgtatcgatcatttcttcaggaccacacaagaaaaatttgtcaaattgtaattctttgtgtttgttattcagtacaaaatttactgccgatttatcaattcttccaaacaaagcattttcagccttagcctgactaaaaacataatggatgaaaaaacggcctacgtactgtaattgtaaatcgtgtagttcctgatggaaaatagtatcttcaggagttttgtttccataaaccaatacaaatgaactttttggctcactttttaaaaccgatttaataatagaaagtaccggagtaattccgcttccggccacaaaagccgcatagtttttttgtctttcagcatctggctcaaaagtaaattttccttccggatgacctacttcaagaacatctccagccttaagtttcgtattggcaaattgagaaaacaaaccattttttactgcttttacagcaatgcgtaattcgctgctttccggtgcagaacaaatagaataagcacgacgaatctcttggttatcaagagttagttttaaatttatgtattgtccggctataaatttatagtctgattttagttcttcgggaacattaaaaagtacagaaacagcatcagcagtttcgcgttttacctctttaattattagttttaagaatgaaggcatgattgtattttttatgcaaaagtagcaaacgacagttaattgacaggcactaaacgattatttttaactttttttgtaacgttttcttacatttgatcacatactagaaaactcaaaacaaataaccatgattaaaaagtttatttatctggaatggaaagcctttgttagatctgcatcattcggcacaagtgtcgtgatgaaagttttattaggttttttaatggtctatttttccttgctttttgttggagctggaataggagcattctatattttaaaaaaaatgaaactggagcctctggtgacaatcaaccaatttttgatttattattttcttttcgatctggtagttcgtttattgatgcaggcaattccggttttgaatattaaaccattattgattctaccgttcagaaaaccgaccattgttcatttttcattaggcaaaacagcattgtcttttttcaattgggttcatgcactgttttttattcctttttcaatagtgttagttttagaagggtatgatcttttgggagttatcttctggtttttagcggcattctccttaatttatatcaacaattttttgaatattattctaagtaatatcgacaagttgtttgttgtttttgttggagcaattatcgctttaggagccgctcagtattataaactctttgatattaccagttttacaacgccaattttccaaggtttttatgcaacaaaaggattgtttttgattcctgctttgattctgatagggctctatctgtttactttcaaatatttcaagaataatttgtttttagatgcaggactttcgcaaaaagaagatatcgctaccactgaaaatctttcgtggctgaatcaattcgggactttaggaacctttcttaaaaacgatatcaaattgattaagagaaacaaaagatcaaaaacgactctggtaatgagttttatctttttgttttacggacttatctttttcggaaacaaacaacagcccgaggtgatgaccatctttgccggaatatttgtttctggtggattcttatttgtcttcggacaatttgtaccgagttgggatagttcgtattaccaattaatgatgacgcagaatattccgtatcgcggatacataacgtcaaaatggtggctgattgttattgctactttcatctctacaatactggcgtctttttatcttttctttggatggcaaatttatttaacggttgttgttggagcaatttacaatataggagtcaattcgcatctggtacttttgggcggtgcttttacaaaaacgccaattgatttgagttcggcgggaggggcctttggagataaaaaagcgtttaatgttaatgcaatgctactgacattaccaaagatattagtgcctttaggactttatggaatcggattgtatttagggaacaaaaccataggattagcacttgtagccggtgccggagttttaggttttgcttttaaagaaaaagtattttcactgatcgaaaaaagatataaaatagagaagtacagcactataagcgcttataaacaaaaaaactaattagttaattagataatgtgtcaattagaaaattgatagcatataattggaaatcaattaaattaacgattaatcaaatcaacaattaaactttcaaaaatgatacaagtaaaccaactttcaaaaaaatataacgatacaacagttttaaacataaacaatcttgaaattccaaaagggcagagcttcggattagtaggaaataacggggcaggaaaaaccacttttttcagcttgttactcgatttgattcagccttcaaccggaaatatagtaaacaacaatattcaggtgaatgcaaacgagcactggaaatccttcacaggatcttttctcgatgaaagttttttgattgggtatttaactcctgaggaatatttttattttattggggatttacgccaccagaacaaagccgatattgatgccttattacagcagcatgaagagttttttaacggagaaatcctgaacaacaaaaaatatttgagagatttatctaagggaaatcagaagaaagtaggtatcattgctacacttatcggtaaccctgaagttgttattttagatgaaccttttgcaaatctggatccgacaacggtaagccgattaaaaaagattattaaagatttggcagataatccaaacgttactgtgctggtttccagtcatgatttgcagcataccgtagaggtttgtgaccgaatagtagccttaaataaaggagaaattgtaaaagatattcaaacttcaaaagaaaccttacaagaactggagttgttttttgcagtataagtttctatatttcaaaaagaagcgtatttttacaagtcaatatactaaaaatcctttttagaagttaattgatataaactcttttctattgaaaaagaatattcttaaatatagtttttttattgtttttttattctttttgatagcctgttctaccaagaaaaataattttttggccagaaattcccatgcgctaagtacaaaatataacattctgtacaatggcggaattggtcttgacaaaggattaaaggctgttcatgcgaataatcaggataacttctggaaaatgcttccgatcgaaaagatgcagtttgatgagaatttttcacaaggggataaacccaaaaatgctgatttcgaaaaggcggagaccaaggccacaaaagcgattcagaagcattccatgaatattggaggaagagagcgaaattcacaaatagacgaagcatatttaatgcttgggaaagccagatactacgatcagaggtttattccggctttggaggcattcaattatattttgtacaaatacccaaacagcagtaatatttatacagcgaaaatctggcgcgagaaaaccaatatgcgtttaggtaatgatgctattgcggtaaaaaatatcaatctgctcttaaaaaatacagatctgaacaagcagacattttcggatgcgaatgctttattggcagaagcgtatttaaatttggaaaaaaaggacagtgcagttgctaaacttaaaatcgctgaggagtttaccagaataaatgaagaccgtgcacgttaccgttttatcttaggtcagatgtatcaggaagccgggataagagacagcgccttctattactatgacggtgtaattgacatgaacagaaaagcggatcgaaaatacatgatgcatgcctatgcaaaaaaggcgcaaatgtttgattataaaaatggagatcaggatttgtttttagaaatgtacaataagttagtggcagatcgtgaaaacagaccttatctggatgttttattttatgaaatgggagtcttctttgataaaaatgaggagcaacaggatgctttggttttctacaataagtcattgggaagaaaatcaaaagacccttacttggtagcgtcgacttatagaaatattggcgacatgtattttaagaataccaactacactatcgctgccaaatattatgacagtacgttagtaaaattagatcctaaatccagagagtttgcttttattgaaaaaaacagaaaaaatctggacaacgttatcaagtacgaagcaattgcaaaacgtaacgatagtatcataaaagtatatggtttgtctccgactgacagaaaaagttattttaatgattatatcgctgttctcaaagaaaaagacgaggagaaacgaattttagaagaaaaagaaaaggaaaaactggccaatatcgatcgtaatacaaatgctaatggaggaccaacagcggttaatcctcagtcagttggaacggctaatcccggaataggagcatttaatccgccgccaggaaatgaaacggcaagtaccggtaccagtactttttatttttacaatcctaccacagttgcttacggaaaattacagtttaagaaattatggggtaatagagttttagaaggcaactggagattggccgctgcgaaatcagccaataatgccgcattaaatgatactttaaataaaaatgcggcaaatactctcaaagattctatagttattgaaaaatatactacagatttctacgaaaaacagctccctcaaacacaagctgcaatcgatagtattggtgtagaacgtaattttgcgtactatcaattaggacttatttacaaagaaaaatttaaggaatataatctggcgagtgacaaactggaacaattattaaaaaataagccggaagaaaaattgattttaccggcgatgtataacttgtacaaaatatatcaaattacaaatcctgcgcgcgccgaaaggataaaatcagatattacaaacaattatccgacttcacgatacgctcaaattttgaacaataccaatgcgggcgatttagcatcaccggataaagagtaccaaaaatggtataaattgtttcaggaggagcagtttgataccgtcttagataatattgacaatctgatcaatcaatattcaggtgatgaaattgtttctaagtatgaattgttaaaagccaataccttaggaaaagtaaatggtttaaccgcatacaaaaaaggtttagaatcagttgccgataattatccaaacagtgatgaaggaaaaaatgcgcgcgagattttagaaaagcaaataccagttttagaaaaacttgattttacttcagttgacagtaaaaactggaaaattgtatatgtagttgctaataacgacactaaaacccgtcaaaagattgaagaagcgatcagagtctttttattagttgaaaattatgagagattgacaacttcttttgataaatacaatagaactgaaagttttgtggtgattcacggtttaaaatcagaggcatacgccagagatatttcaggagtttttagagatgataaaaagtataaaataccgaatcccgcaattatcatatcgagtgataattacaaattgattcaaattaagaaaaacctcgatacctacttagcccccaaaacaccataatcatgtttgataaagtaaaaaaaaacggaacagaacttttaggaaaaacgaatcgaatagttgaaggaacctctattgtaggagacattgttgctaaagacgattttagactggacggagaattgataggaaattttacttcgcagggcaaactggttataggagcctccggcattgtaaaaggcgaaattgtttgtaataatgctgatattgaaggcgtatttcagggaaaaattaaagttttagaagtccttaatataaaagcatcggcacagattcatggagaagttgccataggaaaactgtctattgaaccaggcgcaaattttaccgctacctgtaccatgttagctcatactaaagatgtaaccctaaaagatggaaaaggaaccgaacaaaaacaaaaggaacaagtggcttccgctcattaatattcccgttcaaatggggattattatttttttattttcctattttggtacctggctggatgaaaatcatcccagtccaaaattagattacaacaccatttttgtcatgattggagttggattggctttgtacaatgtaattcgtcaagttaacgaaatcaataaaacaaagtaaatcatcttttaaacggcttgaaataaatattgcatctttgcaaaaaaaaaattcaaatgcttttaaaaaattacaaacccattttatatttattcttttttgctttggcggcttacttattgcacaaagcacttttttcagttttagaaattaatacccaaaacttttattatagtacagcctttttgtatttgatttttttcgcactgtcggcatttttataccttatattattagtagtaaaaaagaagaattttgaaattgtcggaatggctttcctgttcgggaccgccagccaaatgttattggcctatttaattttaagaccgattttggaaaacaaaagtggcgagatagtggttgaaaaaatcaatttttttataacatttattttgtttttgttatttcagacgcttttaactgtccgattattaaatgaaaagcattaaaatggggattatgcaaaagaaggttcaaaaataatttttcatatccttttgaatattaataaaaaatgtacctttgcaccaaattttagaaacgtaaaaaataagatttttaacagatatggtgatttcaaacaaaccgctcaaatttattcttgcagctttagtagcttgttctccagtaatgagttttgcaaattcagagaatgactcaacgcatgtacatgctgaagccgctcatgaagaaaaagtaatttcacataacgcgccgtcggaagaggagcatgcagctcttgacccaaaagcaaaagtggacgcttttattgatcatcacttacaagattctcatgattttgttttcttctcagatgaaaaagaaaataaacattacggttttccattacctgtaattcttattgacggaggtttgaaaattttctcttcttcaaaattacaccacggtgaagcagttgctgaagttgacggaaacttctacaaattagttcacggtaaaatttacaaaacggatgctgcgggaactattacttttaatgaccacggacatcctgaaaacgaaaaaccattagatttttcgattacaaaaaatgtagtgtcaatgctttttgtttcggtattattatttttaatgtttaccggattagcgaagtcttataaaaaaggaccaatcccaactggtttcggaagagtattagaaccgcttattattttcatcagagatgagatcgctgttccaaatattggagagaaaaaatacagaaaatttatgggttaccttttaacggtgtttttctttgtatggttgttaaacttattaggtatgactccacttggaattaacgttacaggaaatattgcaatcacagtttgtttagctgcgtttacttttatcattactcagtttagtgctaacaaagattattggggacacattttctggatgccaggagtaccagttccgatgaaaattattttagctccgatcgaagttttaggtacattaacaaaaccatttgcattattaattcgtttgtatgcaaatattactgcaggtcacgtagtaattatgagtttgatcgcgatgattttcgtaggtaaaaatttagcagcagatttgccaatctctttaggactaacattatttatttcggtaattgaagttttagttgcatttttgcaagcgttcattttcacaatgttatcgtcattatttataggtatggctgttgcagatcacgaccatgatcatggacacggacacgatgataatgttattatttaatttagaagtttaattttatatatataaatacttatgggaacaattccaactttagtaggtgcaggtttagtagtaatcggtgctggtttaggtctaggtaaaatcggtggatctgctatggacgctattgctcgtcagccagaagctgctggtaaaattcaaactgcgatgattattatcgcggctttattagaaggtttagcatttgctgctttgatcttaggaaaataataaagaaagaactaacaacatctttaacggttggttaaaggtgttgttacttttaaaaaaagaaattaaatatttaatatagttataaaatggataagttaattaacgatttttcattcggtttattcttttggcaagcactaatcttgttggttttgattttacttttagtaaagtttgcctggaaaccaattatggaatctattacagcaagagaagaaggtattaaagatgcattactttctgcagaaaatgcaaagagagaaatggaaaacttacaagctgacaatcaaagaattttgaatgaagctcgtgcagagcgtgacgcgatgctaaaagaagctcgtgaaatgaaagagaaaatgattgctgattctaaaaacgaagcacaagaagcgggtcaaaaaatgatcgagcaagctaaagctgctatcgaaagtgaaaagaatgctgctatggctgaattgaaatcacaagtttcaactttatcattaagcatcgctgaaaaattattgaaagaagaattatctaacaaagaatctcaaactaaattagtagagaaaatgttaggtgacgtaaagctaaactaagattatggcaagtacaagagcagcaattcgttatgcaaaagcaattctggacttagcaaactctaaaggtgttgccgaagctgtcaataacgatatgaagtcaattgcaacggcaattgagagtaatgaagaattaagtgcctttattcaaaacccaactacaaaagttgaagttaaagaaagtgctcttttagaagtttttgcagatgtaaatggtgtaactaaagggttatttcatttattatttgaaaacaaaagatttgaaattctggaagctattgctttagaatacaaaaaaatatttgacgaaggtaatggtgttgaagtagcaaaagttacaacagcaatcccaatggatgccgctttagaagctaaagttttggcaaaagtggcaactttatcagataaaaaaataacaattgaaaatacagtagacccatctatcattggagggtttattttaagaataggggatcaacaatacaatgcttctgttgcaaacagattgcaggtattaaaaagagagttaagtaattagttttattacacataaaagtgtctaaattataaattaagatggcggaaatcaaacctgctgaaatttcagcaatattaagaaagcaagtagaaggttttgaatctggtgctacgctagaggaagtaggaacagtacttcaagttggagacggtattgctcgtatttacgggctatcgaatgtacaatatggtgagttggttgaatttgacaacggacttgaagctattgtattgaaccttgaagaagacaacgttggtgtggtacttttaggaccatcaactggaatcaaagaaggatcaacagcaaaaagaacgcaacgtattgcttctcttaaagtaggtgagcaaatggtaggacgtgtagtaaacactcttggttttccaattgatggaaaaggaccaattggtggagacttatacgaaatgcctttagaaagaaaagcacctggtgttatcttccgtcagccggtaacggagccattacaaacaggagtaaaagcagttgatgctatgatcccggttggtcgtggacaacgtgagcttgtaattggtgaccgtcaaacaggtaaatcaactgtttgtatcgatacaatcttaaatcaaaaagaattttacgatgcaggaaaacctgtattctgtatatatgttgcaattgggcaaaaagcttcaactgtagcaggaattgctaaaatgttagaagaaaaaggtgcaatggcttatacagttattgttgcagctaatgcttctgatccagctccaatgcaagtttatgctcctttcgcaggtgctgcaattggagagtattttagagattcaggtcgtccggctttaattgtttatgacgatttatctaaacaagctgttgcttaccgtgaggtttctcttttattaagaagaccaccgggacgtgaggcttaccctggagacgttttctacttacactctcgtttattagagcgtgcttgtaaagtaattgctgatgatggaattgctaaaaacatgaacgatttaccagattctatcaagtctatcgtaaaaggtggtggttcgttaacggcattaccaattatcgaaactcaggctggtgacgtttctgcatatatcccaacaaacgtaatttcgattacagatggtcagattttccttgatggagatttgttcaactctggagttcgtcctgcgatcaacgtaggtatctctgtatctcgtgttggaggtaatgctcagattaaatcaatgaaaaaagtttcaggaactttaaaattagatcaagctcaattccgtgaattagaagctttcgctaaatttggttctgacttagattcagttactttaaacgtaattgaaaaaggaaaaagaaacgttgaaatcttaaaacaaggtttaaatgatccttatcctgttgaaaatcaagtagctattatttatgcaggttctaaaaacttattaagaaacgtacctgtaaataaagtaaaagaatatgaagctgagttcttagcttacttaaacagcaaacataaagatacgcttaacgcgttaaaagctggtaagttagatgacaacattactgatgttatcgaaaaagcagcaaaagaaatttcagcaaaatataattaattagataattaggcaattagataattagtgaatgttccgcatttttctaattatctaatttgcaaattgtcacattttctaattaatagatggcaaatttaaaggaaatccgtaatagaattacttccgtttcatcgacgatgcagattacatcggctatgaaaatggtttctgctgcaaagcttaagaaagcacaagatgcaatcactgcgatgcgcccttatgccgagaaattaacggagttgttgcaaaatctttccgctacacttgatggtgaagttggaggtgattacactactcaacgtgaagtaaaaaaagtattgcttgtagccataacttcaaacagaggtttatgtggtgcattcaattctaacgtaattaaagaggttaagaatcgtaccgaattttacgcaggaaaacaagttgacgtttttgctattggtaaaaaaggaaatgatgttttaagcaaaacgcataaagtacacggtcatcataatgcaatttttgatcatttaacttttgaaaatgttgccggaattgctgatagtttaacagagaaattccttactggagagtacgacagaatcgaattgatctacaatcagtttaaaaatgctgcgactcaaattgttcagacagaacagtttttaccgttagcgccaattaaatctgatgctgcagtttctacaggagattacatttttgaaccttcaaaagaagaaatcgtgttgactttgattccgaaatcattgaaaacacaattatataaaggaatccgcgattcatttgcttcagaacacggagcacgtatgacagcaatgcacaaagcaactgacaacgcaactgaattaagaaaccaattgaaattaacttacaataaagcacgtcaggctgctattactaacgagatcttagaaatcgttggtggagcggaagctttgaacggatagcttatttaagatatttttaaaatataaaaggagtttgagtcttagatttaaactcttttttttattcaagtacttttgaaaaaggcctattttggttttaaaaatatatagctatccgaaatctaccgcttttacttggttttttgagccataaatgcatttttaaagcaggttaaaatgtttacctgccggactgcgaaaattatacttatcacctgtttgttcatttaccaaactaataataaagcaatattgcttccctccttcaagatattttgaaggctgtattgataattttgtatacttttcatgatctattatatgtgcagttgcaggacgctgatgacgctgtccttctgctacgggataaaacatagcattaagaactctaagagaatttggaggaacttcctgagggggcgcaaatatggtaattgttgaccctattctttcagatgtcggagtaaaatctgttacatcaatgtttgttatcatggtttttattttttttaaagtaagtccggtgagccagtaatgtacttatgttatatatactagacaagtaacagaaaataggtatccttgtcctaagatttttgcaaaagtaagaataatcttaaacaaaaacaaagactttcttagtaaaatgaagattaactgtaacattttagtgtgacaatgagaattaaagttattttcagttgttagtcctaaaatgacggtttttgatcatattggatgctagaaaaaatttgaaataaaagaaagactgtctaaaagcattgtccggaagcagattagcggttattcgtgtatttctatatcgggttgagaattatataagcgacaacgaaaaaataagtatttttgaaatctatttttttaaacaatgaaactacaaataaaagaactcacgacaatcaaagaaatggtggatcagattgataccatgcgatttctttatccaaatctttcagttgaaaagtacacggcctatctttcagaaatggttcctcataattatatccagatcggtgtttttgaagagggtgtttgtttagggattaccggttgctggtcggctacaaaactatggacagggaaatatcttgagatagacaattttgtcgtaaatccggacgttagatcaaaaggaattggaaaattgctaacggattatatcgaacaaaaagcaattgatttagattgcagcagtatcgttctggatgcatttaccggaaattttgctgcgcaccgtttctattacaatcaggggtacggaccaagaggttttcattttgttaaaattttagacgaaaaaaaattaactcactaaaattccggcaagttcttttattgaagcgcaaaatcaataataaaccaaagaattggttatttttgttttataaattttattacacacatatattttgggattatataaaaatctattcaaacaaacggctatttatggactagcgacggttttgccgcgaatgctgagttttctgttagtcagattgtataccggtattttaccaactgcagaatacggtgaagtttcgattgttttgtcctggatggttttctttaatgtggtactttcgtacggaatggagacggcattttttaggttttacagtgccgaagacgacaagaaaaatgtaatagctacttctacaatttcaatattttggtcgtcgataattttcttatttgcagctttaatttttagaaatacattggcaactttggccgaagtagatgtgcagtacatcacctacaccgtatggatcctggttttagatgctttggttttaattcctttttctaagttaagagccaatcagcggcctatggtttatgcggcgattaaaattggtaatgttataatcaatctgttactgaacatatttttcctgatgtaccttcctaaactggcagcatcaaaccctaattctgtttgggataatttgtatgtcgaaaactttcagattgcttatatttttattgccaatctattggcgagtttagcgacgttcatcgtgctttcaccaaactatctttcacttggacgaaaatttgatccggtactttggaagaaaatgatgagatatggtttgcctattttagtggcaggacttgctttcgcagttaacgaacattttgataaaattttgctgggatatctgttgccggagaatcttgcaaaatctgaagttggagcgtattcagcctgttataaattagggttgttcatggttttatttgcaacggccttcagactcgggattgaacccttctttttcagtcatgcgaaaaacgaaaatgcacctcagacctatgccgtaattacaaaatacttcgtgattttaggatcattgattttattaggtgttattgtatttgcagacgttttaaaatatttattgctagataataaatcgtattgggaggccatgaaagtggtgccgttaatcattttggcaaacttctttttagggatttacaacaacttatcggtttggtataaactaacagacaaaacacaaattggagcttatatctcgattgtgggagccatcgtgactttgattttaaactatgttttaattccaaagtacagttactacggttctgcaattgcgactatttcagcgtacggaagtatgatgctgatttcttatattttaggaaacagatactatcccatcccttatgatatgaacaaaattggagcttacttaggaatttcaattgtattttcggctatctctttttacggattcagagaaaattattttgttggaatccctttgtttttgggctttgtctattttgtttatcataacgaaaaacaaacaatcaaaggaattatgaataaaaagtaagggtactttttaatcttttaaaataaaaatgaaaatacaaattatcaataaatcacagcacgctttaccgaactatgaaacgatcgcttcggcaggaatggatttacgtgccaatttaacagaagctattacgttaaaacccttagaaagaaccattgtaaaaaccggactttttatagagttgcctattggttatgaggcacaagtacgaccaagaagcggactggcggcgaaaaaaggagtaaccgttttaaactctcccggaactgtcgatgcagattatagaggcgaaataggcgtaattttagtaaatttatccaacgaagaatttgtcattgaaaatggagagcgaatcgcacaacttatcattgcaaaacacgaaagagcagaatggatagaagtgaacgagctttctgaaacgtcaagaggagaaggcggatttggaagtacaggagtaaaatagttttcagtcacggtcgcagtaatcagttttaatagattgcgatcttaaaaatgaaatgaaaaaacttaggaatctttgcgaaaaagctttgcgaactttgcggtaaaaaagttttaacttacagtataaataacctttacgattaaaattaagaaccaaactaagagggttttttaaacctttccattaaaataaataaaaagaaatgaagataatcgttccaatggcgggtcgtggatcaagacttagaccacatactttaacagttccaaaaccattaattccggttgcaggtaaatcgatcgtgcaccgattggtggaagacattgccaaaatactaaaagaacctattgaagaggttgcttttattttaggagatcctgctttttttggtgatgatcttgtagcaagtttagaagaattggcaggaagtttaggagccaaagcttccatctaccgtcaggatttacctttagggactggacacgcgattatgtgtgccaaagaatctttatcaggtccggcagtaattgcttatgcagatactttgatcagagccgattttgaattagatccttctgccgatgctgttatttgggtgaaacaagtggatcagccggaagcatttggtgtcgtaaaattaaatactaataatgaaattatagaattagtagaaaaaccaaaagaatttgttagtgacttagcagttattggaatctattattttaaagaagtaggtgatttgaaaaaggaacttcagggagttttggataataatattcaaaatggtggagaatatcagatcaacgacggaattaaagccatgatggcaaacggtaaagtgtttaaaaccggaagtgtggatgaatggatggattgcggaaataaggatgttactgttgaaacaaattcaaggatgttagggtttttacacaatgatggggagcatttagtagattacgatgtgaaattggaaaactcaactatcattccaccgtgttatattggcgaaaatgtagtgttgaaaaacacaacagttggtccaaatgtatccattggtaaaggttgtcacgttacagacagtacaattagcaacagtttaatacaaacttattctcaaataaaaaatgcacagcttgacaatgcaatgattggaaatcatgtggtttatgatggtaagtttagcagtgttagcatcggagattattcagttttagaatagattatcagttggaatagattcgtttttgtttaaaaataaattttaataaatgatacaaaaaggagttatcgcgattttatttttcgttttgcttggcaatcccatttcggttatggctcaaacagagccggaagatattgctgtggcaaccgatgagtatcaggatgctttttatgaatcgttgaaacaaaaaggaattgaaaattatgataaggccgtcacttcattacaaaagtgtatcaaactaaaacccaatgatgcggtggcttattttgaactcgggaaaaattatctgtccttaaaagattatcgaagcgcgcaggattcttttgaaaaagcgactcaacttgatcctaaaaacaaatggtattggctgggaatttatgatgtaagttttgaaaccaaaaattatcctttggcgattgaaaccattcagaaaataatggtttttgatgaagagtacaaagatgatttgatttcgctgtatatgatcaccaatcagtttgataaagcgttggtggcgatcaatgaaatgaatgataagtatgggaaatcagaagatcgtgatcgctatagattgcaaatcttatctcaggggaaatatcaaaatgcagaaattgataacttgattgagcagataaagcagcatccaaaagaagaatcaaattatgtaaatctgatttttttatattcaaaatcagaagaaacagataaggcgctaaatgttgcaaaacagctggcaaaggaaattccaacttcagaatgggcgcaggtaagtttgtttaaagggtatctggattccaatcaggctgataaagcgattaaggcaatgaatgtaattttgggaagttcaaaaattgattccaaaataaaacatcgtaccttaaatgagtttttgatctatacaaacaaaaatccacagtatgcgtcagatttagagaaagccatttcctatttcgataacgatcctaatgtggatgtggccaaagaaattggaaaattctatcacagtaaaggtcagtttgaaaatgcgattaaatattatgaaaaagatttaaaagccaattcagagacagaccgtgaaactaatttgcttttgcttgaagcgtatgctcagatgaaacagtttgagccaatgacaaaaagagcaatgagcatgattgaggtttatccaagtcagccgcagttttattactacgccggtttaggaaataatcagttaaagcaatttaaaaatgcaaaaaccgttttagaaataggactcgattatgtggtagaggacaaaacactggaggcaaattttaatattcagttgggagaggcttacaatggattgggagatgcaaagaaaaaagaggaatactttttgaaggcaaatgaattattgaaaaagaaaaaatagaggaaagaaaatagaggaaagagggggatgtgcttatatgctaagatcttgatttttattttcggcaacctgaaacaacactataaacaattaaacagattttgatttgtccagattcaaaattaaaaaaggcggtaaatgaaaaaatatatagcgatagcggtattatccgtttttatgatttcctgtaaatcaaaggcggttgccgtgcagaacaataccagcgaagtaaaagaaattacgccaaaagaagaaaaaaaagtaatagagaatcactataacaataagttagatttttcaacgctgtacgtaaaagccggtgcacgatatgttgacgataaacaaagtcagaatgttaccgccgagattaaaattgaaaaagacaaacaaattttagtaagtgttcgtttcctgggtattactatggcaaaagctttgattacgccaacagcagtaagctactacgaaaaaataaacggtacctactacgaaggcgattttacaagtctaagtaaatggctgggaacagaactggattacagtaaagttcagaacctattggttggtgaagctttagatgatttgagaaaagggaaatatgcacaaacgatagtagataatctttttcgtttagaagatgaaaaagattctaatctgaaaaaatcattctatttggatcctgaaaaatacctgttgcaaaaagaagagatctcgcagccatcagaaaacagattcctgcagatttcctatgccgacagtaaggttttcaatcagggaatacttccaacaagtattgaaatcagtgcaattcagccaaaaggaaaaacaaatattagtttaaattacaatacgatttcgtttaacgaagaactttcttttccttacagtgtgccaagtggttataagaaagttataattaagtaaatttgcaaaaagaaaatataaacatgccaaaatttctcctaagcctaatttttatatgtgccactacttttatgtgggcacaagattcgcaacaagaaaaactggaacagcgtaaagctcagattcagcaggaaattagagataatgaaaagatgctgcaatcggtaaagaaaaaagaaaaatcggcagtaaatgtttatttaattcagtccaataaaatcaagctgaaagaaaagctgattaatactactgcaaagcaggaaaaacttttgagtaatgacatgtatattaatcaggttaaggttaataaacttaaaaaagaattggaagtattaaaggcagattattcaaaaatgattcttaaatcatacaaaagccgatctgagcaaagcagagctatgtttattttatcttcagagagctttttacaagcttataaaagagcacaatatttaaaacaatataccaatttcagaaaaaaccagggattggaaattcaatccaaaacggcacagctggaagactataatgcgagactgaacggtcagcgtattgtgaagaagaagattattgctgaaaatgaaaaagaaaaacaaagtttagaaacggaaaagaaagagcagcaaaaactagttaattcgattaaaaaggacaagaacaaaattattgccgatacgagaagcaaacagcaggaagccaaaagaatcgacagacaaattgatcgtttgatccgtgaagccattgcagaagccaacagaaaagctgccctggaaagagcaaaagaaaatcctggttcgacagcatctaaaactccggtttcctcgtctaaaattgcattgactccggaaggaaaaattttagctgccgattttaaagccaacagaggaaaattaccatggccggtagaaaaaggatttatttcattaggatatggtgatcagcctcaccctctttatccgacattaacggtgcataattcaggagttgagattacaacagaacaaggagcaagtgcccgtgccgtatttgaaggagtagtatcgagtgtaattgttttgtctccaatcaacagagctgttatgattcagcatggagattattttaccgtttatcaaaaccttagtcaggtttttgtggagaaaggtgataaagtaaatgtaaaacaaagtataggaaaagtgagaaccagtggtgacaccggaaaaaccatcattaagtttttgattcttcaaaatacatcgaataacaatccggagggatggttgcaaaacagataatagtattgaatgggaacttttaaattttcgactatccgttacttctattaatctagataaatataattttgaaaatggccgtagatgccacagatgaattccgaattgggctccagaggagcctaataggtatagcacaattatcaagcacgacaaatgagctccagcggagcgctatgtcagaggttgttgtttctattatcaggataaaatttggcaaaattgtataatcgcagcgaagatttttttgcttgtcaaaatgactggattgcggaaaatttggtataaaaagggaggggttaaaagatttacattccgctcccctggagctttttgataccgtgaaattaaaattactatacctattttgctccactggagcagttttaaaaaaagtagtagtccctttttaaaaagtttctaaaacagtacaatattaaagttgattcaggacttaaatagaaaaaccttttcaccggaaatagactggtgaaaagttttttttatttaaagttaatcgtattgttcaagtaaatatttcataacatctgttgtcgttacaatgccgctaagtttgccattgtcgacaacaggaagtgcgtgaaattcctccataactaaaatttgagctaaatcccgaatactggtatcggatgaaacggtttttggctttgaagtcatgatttgagaaatactgagcatttctaaaatagcttcgtcagcttcctcctgtccttcgaacaaagcaccaaaagttaggcgattaatatccgtgcggcttatgataccaattacttctttgcctctgacgattgggatatgtcggatagagtgatgttttataagttcaacgatttttttaaggtcgtcactttcacttgcagtaatgacgcttttagtcataatatgactgataggttctctctttttcataataggaagtgttgtattatttctattaaaattgtgaaataatccacataaaacaaatgacctttatcatgttttacaacttctcaaaatgttgaaacaagtagagtactggctgaattttctttaaaaggtgagttatttttgaaagaaagtgaacgagaatacaaaaatcatcctattgttcatttgaaattgcaccgattgaaatttaaaaatagtatttttgcagtatggaaacaaacagacagaaaaaaataggcggtgtcatccaaaaagatttggttgatattttgcaaggtgaagtgcgaaaaaacggaatcactaatttagtaatttcagtatccaaagttagtgttactacagatttatcggtagcgacagtttatttaagcatctttcctcaggataaagcccaagaaactttagaaggcataaagtcaaatacaactttaatcaaacacgatttgtcacaacgcgtgcgtttgcaattgcgtcgtgtacccaacctggtgttttttattgatgactctttagattatatcgaaaagattgataatgcattatctaacagagagaacccaattgaaaaccgtgatcttttagaaaaaagaagaaaatcataaattgaatttccccctttacatagccaaacgttatatttttagcagaagtaaaaacaatgctatcaatatcatcaatcgtattgccagcatgggaattattgttggaacgatggctttgtttgtggttttgtccgtttttagcggactaaaggttttcagtctttcgttcaccaacgaaatagatcctgatctgaaaataagcagcacttacggaaaatcattttttgtaacgccggatcaggaaactcagcttaaaaacattgatggaattgcttcctacagtaagattatcgaagaacgggttttgtttttgtttaaagacaaacagctggtaacctacttaaaaggcgttgacaaaaactatattgttgttaacgatatcaggaaaaaactttttaacggagaatggctaaaaccggatacctatcaggtggtcattggttatggaattgctcgtgatttttcgttaggaattcttgatttcgaaaatcctttacagatatttgcacctaaaccaggaaaaggagcgatcgaaaatccggaagaagcgtttaataaaacagacgttttaccagttgcaatttactccatcagtgaagatttagattcaaaatatgtttttgcagatttgggtctgacgcaggaattactgctgtataaaacaaaccagatttccggaatagaattcaatctgaaagaaaacgccaatgaaactgcgatcagatctcagcttgaaaagatattcaaaaataaaatcactataaaaaacagagcacagcttaacgaatctttgtataagatgctcaataccgaaaacattgtagtgtacctgatctttacactagtaattatcgtagccctttttaatttagtgggtgctttaattatgatgattttagagaagaagcacaatctgaaaacgctttttaatctgggaacagaaatcaccagtttacgcaaaatattcctgcttcagggaaccttgttaagtgtttttggaggtataattggtcttgttctgggcatcattttagtattgcttcaacaagaatacaatctgattatgctgacacccactttggcctatccggtcgtttttactttagaaaatgtacttattgtgatggcaactattgtatcacttggttttgtggcttctttaattgccagcagccgtgtgagtaaaaagcttcttgattagtatttctaccagaaaaatattacctatatttaccgtcttaaaaatctacagcatatgatagtttctgcttagtcctattttatttttagaataattaggatacttacgtttgttttttgagttcagatcgttgcatttggacaaattttatcatttatcttaatttattatgacagaaactaccatacagaaaaatctattttctaaaatttacacgactttaaaacaggctctccaaggagatgagtcttttgattataccgcaggaagcattaaaaaagcagtcattctattagccattccgatggttttggaaatgatgatggaatctgtttttgctttagtcgatttgtattttgtcgggcatttggagcacagcagttttgcaatccagacggttggattaaccgaatcggttttaaccattatatattctattgacatcgggttaagtatggcagcaactgcagtggtagcaaggcgtattggagaaaaagatcccgtcgctgctgcaaaagcagggatgcaggccatcgttattgcatttgtgttaagtgtttttttaagcatttttggaattatctatgccaaagatattctccttttaatgggagcatctgcagatgcggccgagcatggttttaggtatacccagattatgattggttccagtttaagtattacgcttttatttctgattaatggaatcttccgtggtgccggaaatgctgcaatcgctatgaaaagtctttggattgccaatatttgtaatattattttatgcccgatactaattaatggttttgccgaaattcctgcgcttggtttacttggtgctgcgatcgccaccactaccggaagaagtattggtgtcctgtatcaaatttatcacttgttctatggaaatggagttttgaaaattaaaatgtcctacctcttaccggattttaaacagataaatgccttagtaaaaattgcagcaccgggcgtattacagtttgtgatcgcttcctgtagttggatttttctggcacagctggtagcaacaacgggaggagatcacggatcggcaggttatcagaccgctcttagaataatgatgttttttattcttccggcctggggattgagtaatgccgctgcgactttggtaggacaaaatttaggagccaaacaaattgagcgcgccgagaaatcggtttataccacagcaaaatacaatgtcatctttatggcaacgattatgatcattaccttgtgttttggagaatatatcatttcattttttaccaatgacgaaatggtaaaaaccattgctgttgaagcgttacagattatgagtatcggatttattttttacggaatcgggatggttttgatcaacacatttaatggggcgggagatacctggacaccaacaggaattaatttctttggattttggctgtttcagattccgttggcatttgtgctggcaaaacattttaatatgggaccaaaaggtgttttcattgcaattccggttgctgaaacggctattactttagcagggattttcttttataaaaaaggaaaatggaaacgtgtgcaggtgtaattttaagtgaaaatagtatggaattaataagtattagagacgtattatcacatccggaaaagaatttagaatggttttatcttccaccaaattctggcgaatggaatttagataccttaggaattttttcacttgatagtcgtgattttgcaccagactcagatgaatatttgccaaaacaagtaaaagaaatgggttggatagaaaccttggatgctgcaagcattgaagatgtggtagaaaatgcaaaagaagaattagaaaatccatccattaatcaattgtttgatgcattcattttttattttgaaaatgatgcatttcttgagtttgagaattaaatgattttatgcaaaaagaggaagccatgtaaatgaaacttcctcttttttatattttaaacaaactcatatccggcataaacctcttcgatttctttcataacagcgaaaagattttcaggttcgtctgtagtaaccagtttttgtttgtattctttaaacgaatggattcctttgaaataattggtgtaatgacggcgcatttctacaattcccaagcgttcgcctttccaatccatagaccattgcaaatgatttctggccgcttcaacacgatcaattacggtaggggaaggtaagtactcaccggtattaaagtagtgcttgatttcgttaaaaatccatggataaccaatcgcagcgcgaccaatcatgatcccgtcgataccgtattcatttttatattttaatgctttctcaggactgtcgatatcgccatttccaaaaataggcatggtgattcttgggttgttttttacacgtgcaatgtgcgaccaatcagaatggcctttatacatttgtgcacgggttctggcgtgaatcgtcagagcctgaacaccaatatcctgaagcctttcggctacttcatcaatattaatagagctgtcatcccagcccaaacgcgtttttaccgttacaggtaaatcggtacttctgatcactgctttggttaaacgtaccatcagatcaacatctttcaaaactccggctccggcacctttgcaaactactttttttaccggacatccaaagttaatatccaccaaatccggttttacggcagaaacaattttagacgaaagtgccattgcttcttcatcaccaccaaaaatctggattccaacaggacgttcgtaatcaaaaatatccagcttcattcgacttttgatagcatcacgaattaatccttccgacgaaataaattcagaatacattaagtcagcgccatgcgttttgcacaatctgcgaaacggtggatcgctcacatcttccatcggtgcgagtaataaaggaaattcgggtaattctatgttgccaatcttgaccatcttcaatattttttgcaaaattacaacatttagttcaatttaaaagattctaagtctctaagatgctaaggttctgagttttcattcttattaaatagtaaaagagaaacttagatccttagaatctcagtatcttagcaactttaaaccgtaactcggtaatcaaaaaaacgaataggttttcggctcatagggttaaaaaccaaaggattcaacgcttcttttggagcgaattcaatttttggggttactcttaatttggctctgaaatgatctttgatctcctgcaagaattcgggagtctgattttttacggctatttttatcaggatctcatcggttcctaaatcgttggtagagatctcgataatatgattttcgatattgtcaaaaccactcagaacatcattcatcgctggcggataaagtgttgtacctttgtatttgatcatttgttttttgcggccaaccaccggaccaacacgcaaggtatttcttccgcaggcacaaggaccgttgtgtagttgtacaatatctccggttttaaaacgcagtaaaggcatggcttcaatacctaaagtggtaaaagtcaattcgccaatttcaccttcttttacaggcctattattttcatctaaaacttcaacaatgatcaattccggatgatgatgaccgccaacaccgtgttcacattcggtaaaagcggtgctcatttcggtagacgcataagtggagaacaacttaatattccacttttcggtgattttgtttgacagagtattcattgaaaaatcctgatttcgcaaaggttcgccaatacaaatggcgccttttatgctggagttgttgtaatcaattccgtgtgcttcggcatattcgattaatttcagtaaaaaggaaggaacggtaatcaggtaagacggtttgtattttaaaatggaatcccattgcaattccggaattccggcaccaacgcggattacccccacttttaattttcgcaatcccagaaaataagccagaccggccataaactttctgtcaattgtcgtcatcagctgtaccacatcaccttcggcaattccggcgcaggcaaacgaaatggcttcgttataagccagacgatccagatcagaatcggttaaaccaaaagtaacgggatcacccagagttccggaagtagaagcataatcaataatctgatgttgcggaacacataaaaaatcatcgttgtactcttgtaaatcttcttttgttgttacgggtaaatgctgtaaatcttccagggttttaatcttcgaaagatcaatgttttgtccggcgaaaagacgtttgtaaaaaggagaattttgactgatatagtgtaatagttccgctaacttctgctcttgaaaaattttaatttcttctagagattttttttctattaatggaatcattgtaattttcttttgattttttttaaatatttttcaatgactgttttgtcaggaacagttgtgatttcttttgttagtgctttttcaaaattggactgagaaagacggtactcttttttttgataaaagtacaaccctgctttgtaatacacaacccaattatcagggtttaacgattggtaattcggtatgaattcaggacttattgtttctttgtttttcagatacgaatcaaatttgtggtcttcgactctaaatttttggtaatttttataggctattgtttctaaaaaaggatctttcggaatgtctaaatttacttgctgtaaggaaacaatgcgatctgtttttctttctttaaaaatggtatccagattataacacacaaattcgcctaattgatacggatttgtggatacccaaacttgttttgtagcaggtttaaagataacaccgtgatgagccatcagctggttaagtgctttttcattaccatatcccaaactaatattatttaaaccctctttatttcgaagaatttcagaggcaattttaggatcgattttcggattttgagaaaaaagttccttcatcttttccatacgatattcagaatgactgttggccatttggaagcgattgcgtttttcgttttttaaatcttctccctgaaaatgattcgaacaaaataattgattgctgtttggagtctcgtaaacgtccattttttgaggggtgacttcaatcagaacggctttgttatcttcggcacttcccaccataattgattcggatacaaaaacggctctttttttggcaatagcaattgcttcgtttatgtttttggcgtgctgtaatatttcgcgggtaagaattgaaatgggtgttttggcaatcaacggaatttcagattttccggcattaatggtaaccgttagtcctttttcattcattccggaaaccgcaccaatcattccgggccaggtaatcatcataaatttgtgaccttctttcggattgataaacgccacgattttattttctgcgaaagcatcattcacataaaaatcaaagttgcgtccgaggattaaatttccgtcttccgatttttctccccatgctgcaaaggatgaacagcccactaaagccaaatcctgcagggcatggccaatatcgtgtgcagcatgcaggtacagactgcgctggtatcgtggtgcaatgttattaaaatcaggagaggtgtattgtgaaactccaaaaatttcggtttgatattcttccggaacattcaaatatagttttcgattgtaccatttcaggaaatggcgaaggagtttctgttgaaattttgacggaacgatatcctgtattttagagaagaaaatacgttcttgtttttttaaaagcgaatctgataaagcacccgtgttgagtccgatttctaacggatcgccttcggcatacaattcccaaaggccttgtctgttttttaaaagcgaattttttccggaaataaaaatactgtccgatagtttagtgacaacaggttttgtcgcattgtatttggcaatctcaggctggtgtcgcattgattttgatgttccacaagaggccaacatcgttaaaaaaccgataaataaaaagaatataattcggtttttcatagctttttattcagatgcctgattgattttgtttaccaaatattctttaccaacaatttcagaacaggttaccacggctccaatagttactccgagaaccccatgcatgttgatactttggcccgtaagatacaaattatccagtttggtttttgagggaatcagcgttttcatcggattattcgaatccttaacatatccgtacatattgccattgtgcccgccaatataatcgcgataggagagtggtgttgaagtatgaacggattgaatgcaatttttgatccccggaaattttagttcgatttcgtctaagaatttcgttgcctttctggatttaaattcttcgtaactctctccgcggtcattttcttcaacggtagtgttaaaagtatctgcccacgggattacatcatcgtatttcatgtaggtaataaaagtcattccttctgcccattcttcctgttttttggaggtattcattgaggccataaagccttttggccaggaatcatcatcatagttatgagcggtccagacttcgctgcttttcttaaaatgataatggttatgattgatgtatttaaaagtttttggtttaaagacaatgtacagactaaacgccgaaattacaccttcaagactttgaactctactgtaaaatgattttcggaagtgttcctcaccggtcattttaagagttgttttaggctctatgtttgagataaaataagtaccggaaacattggtcccgtccttcatgtttaccgaagttacttttttatcttcaacattaaaacgggtaacttctttgtatttgtaaaattcaccaccatattttttaagctgttttaaaagctgcttggtaatctgacttccgccattgatgcagcgccacgaactttgaatataagaatttacagaaagggcatgaacataaaaaggtgttttgtcggcaattccggcatacaaaaaattagaaccggcaagaacagctttcagtttttcattttgggtgcattcatcgatcgtctgtttggcgtttaagcctaagatttcattatcgtatttaccttcccattctaaattgtagagcggaaaagattcgcaaattgttttgattcttttgcagtattcctcaataccggttttttcttccggaaaaaaatgttccaattgagaagtaaaattagcgtaaccctgtgcatgaggatattcgttttgatcgtcttcaaaagagatgatgtcaaaaccgttatcgtccatttttttgaggttaagatgctccataatgcccaaatagttgaaatatttgaacagattttgtcctttttctaagcctccgatgtaatgaattccggtatcaaaaatggttttgtcacgtacaaaagtctggagatttccaccatactgattgtttttttcaagtacgcagacgctataaccttctttggcgagaataatcgaagagactaatccacccaatccactgccaacaattacaacatcgtaatgttctttcatgctccttttttctttaatacaattatactgttatcttcaaaaacacattcaaaatcaaatgtaatcaaagtgttttttaaatcagaaggattgagcaagattaccgtagaagttagagaaatgattttttcaagatcattggcttgatttttatcggaaatcaaaagaacatcatattgattttgcaaagccggttcaagcgtatctaaataagagatttttctttttttgaggaaataattggtttttgaaatcgctcgtttttcttcgtcaaaattaaacgaagttatttttcgctgaggctcctgcaagcttagtaacacatctaattgtccataatcattggataaatggagtatcctgtcttttgccgaaagctgtttgtttaaacgataatagacttccagatgctcttttaaatcgctcttgacgttatggatgatttcgatttctttataatcgaaactgtgtaaaatcatttttttgaaatagtccggaccttctaattgttgacggattttgtggtactcttctttaaaaaaagcactcatttgtttggttctctcagcataattttttccaaaagaagtattgtccggagaaattcgttccaagattgaaatcgtaagatggctgtgatgaatgacaaaatcgccttttggaatcgcttctgaagctccgtgaatgaccacaggaataatatccagattaaattcctcagccagataaaaggctcctttatgaaaacgtttgacctgattgctctcagaacgcgttccttctgggaaaatcattaacgaatacccttcgtttactttttggcgcaaatgttctactccgccttcaattccttccgaaaccggataaaaacctgcttttctgacggtaccgccaaaaataggagagttgtacacccagtcgcttactaaaaatataattttagggctcagcattcccattgccaaaatatcaataaacgaagaatggttggcaataataatggccggtttttcgaaggtttctccaaatttattgacgacttttttatgaataaacggattggaatacaataccgatttcatgaattttgagatcacgtatcggaaggctttcatttttgttttctccttaatcggcagcagcggcataatagtgatactgaaaagcgacatcaagattccgcccataccgtaatagaaaaaagagatgacaccgtgtataaaagtgcgtaagacaaacggaggatttcctttttttgaacggtttgaaatgaatattttaaaaagaataggatagaaaataaacgtaataataagggccgcaaaaaccccgattagtgacactgatgaaatagatcgcaaggccggatgcttagcaaaaatcattgcaccgattcctaaaatagtggtgattacggcaagaatgatagaggttcgataaatagcaatttcgtttttcccggtcgtgtattctttttgaagggcgctggtcataaaaatactgaaatcgacaccatgaccaaaaatcagggtacagacgatcaagctgaatatattcatctgaagtccaaaaacacccataatcccagccgtaacaattcccgttaaagcaattgggatacagcttacaataaccaattccagtcttcggaaaaagaaaaataaaatcagaatcactgctataaacgaataatttaccagtgtgttgaaatcggtttttaaagtactgaaaaacgtttcattcatctgctggcgatcaattgcaatcagattttgtttcgtctcagttgattttacgaaagaatctctttgttcaggactcacttttacgagagtagaaatggtgaagaatccgtttttttcggttacaaattctttcagctgtaaagcctgtattttcaaatattcctgtgcggaaatgggtttgaaattgaaattcaaatgctcaaaaaaagcggtgtaagtagtaggtttaaatccgagtttggaaccttcagaaattaggtctgtttgtagaagctgttttttgttggtgtcccaaaacgaattccagcgatcgattttttgctgttgctccttttgcgaaagcataataccgccaacagaactaaaattcaatattttgccgttttgtttttcttttgataaatcggagaacagggcagtgttatttcgtaaaacctcttccatactatttccgtaggctgcgatatagatagttttggaggttaggctagtgctttcttccagatctttttcagccgcttttatttctgtcggaataaaattcagttgtgacaaatcgttgttgaaccccacattcttataagtaaagcaggaaacaataactattaaaacacaaaaaccaatcagaaatttgttgttgtgaaaggaaaaatgagccagtttatcaatcacatttttcttgtgttctacgttattctcttttggtttgtagagatgcggaataattaaaagagagaaaaatgcagaagccattacgataacggcagcgaaaatccccaagtcatttaaggcatctgattttacaaaaagcaggcacaaaaaggcaacagccgttgttgaactgctcatgattaccggcatagtaatgtctttgtacaaggtttttatatcgctgttgtgcttgtagtgtgtgagaatatgaagggaataatcaatggtgattcccaataaaatagaaccaattcctaatgaaatagcagaaatttgttcttttgcaaagtataaaaaggcgatggcaaacaaagcgccaaaaacagtaggaagaaaaataattatcggaatcaatacttttctataaaacaaaatcaaaatgagcatcagtgtaaacatcgcgattgatgtggtcaggatgatatcacttttgatttgattggcatttgcgactgcaatcagggcagagccaaaataatgaatcgaggttttggttttgaatttctgattcagattgtcctgaatggatttcagttttgctgcaaaaatggtattctgttcggtttcgcttgaaggaagatttgaggtaataaaaagaagtaatttctttttgtctttggtcataacaaaaccattgtcaagcgtaaaatcgtcaccaatatttaattgctgtaatttttttaaagcgataaaggagattcctaacggatcctgtaaaataaaatctttcgtgataaatccggatggagcgataattgatttataatttccctgaactgtcgccgcgatactgtctttttgaagtttactttgcaggacttcgtaatctttattttccaggaaaagaggcagattgcggtagacgaaatcaatggtttcctgaatattttcttcgtcaatttttccctgaataccgcttacatagggcttgcaggactgagtgacactgtctgaaaaagcagttgccatttcttttagatcgtcttcggttccgtttttatcgagtttgaaaataaccgtagttttatcagcaaaattaagctgtttaagcacttttgccgtgacatctgttttatcattcgtgggaatcagtttggtgatatcctcttcaaatttaatttgagaggcaaaaaagccaaaaacaaaaaggatcaaaatagccagaataaccgataaagattttcttcggtttacaaatagatgaatggcgtagaaatattgatgcatgtttatttagtattgtttttgcttacagtttttttcgccacgaatttcacgaattttcgccaattaaattgtgctaatttgtgaaattcgtggcgaaaaaaatccgtttaattctttcaatctgtggcaaaacattatgtaatctttgttttgttcttcgcgctgaaagcggttaaaagtaaataacttaccagacctgctgagagcgctaaaacggatgctaaaataagacttcccacgatatattgtgttgcatttttttgaatatcatcgagtgtaaccgaaccatttgcagtaagcataacatcgtttgaaacaaagtaacttcccatttttaaagatccgtaaataacaaaaggaatgaaaggcggaaaactcacattggaagctaaaaaagcaatcactttgttaagcttaaataaggtagcaaaagttaaaagcaggatggtttggaacccccaaaaaggagaaattccgataaaaattcccaaagcaattgctgccgattttttaaaattggaatcactactttctaaaatgtcttccaaaaagaattttttaaaaccttttttttttgcttttctaaaaaagtctctgggtttgatgtacagcaatgcccaaatgaccaaaacggtatttaatatgctgatgcgggtaaagtctttaaacggacgaaaatgagaaacacgttcagcaggatcgtacaaaatttgaacaggaatatttttaaccacaatacctttccaggcagagcgcacaattacttcaatttcgaattcaaacttattggtataaaattgtttcggaatgagtttcaaaggatacagtcggtaaccggattgagtatcgtcgagttgaattccggtttcaaatttaaaccagaaattagaaaacttatttccgaaactgctctttttaggaacattttcctgagtcatatttcggctcccaatcaataaagaattaggttggttttgaatctcggcaataaaattcggaatatcggtagcaaaatgctgtccgtctgaatcaattgtaatcgcgtattcaaaatctaattcgattgcttttctgaaaccatttcgtaaagctcttccttttcccagatttttaggatgatgaatctgagtgtattgcgaatagtgtttcagaatttcagaagtttcgtcggtcgaaccgtcattaacaataatgacatttgaagtgaaatctaaaacagaatccaacactcttttcaatgttttgtgattattgtacgtgggtacaatcacacaaaaatttgtagcgtttagtaattcctgctgtggtaaagtaggtatcatgagttttttttcctttatctacttcacaaattgtttctctttctcagagaaactctttgattgtaaaacaaagttttttagatattcttttaaagcagcactttgctctgcgtaatgctcggtgaggtattttttgtcttctttaatgttttttctatagccggtaattccaggaacgttctcctgaatactcagccgaatcattctcatttcgatattattgggatcattttttatagtggcttccaataactttgcgccttctttaaaacgatccattttatcttttaaccggtttttaaatttcgaatccaataaaatagaagccgctttataggctaccagaattttatcatcgttggcagaaataccagaaagtttttctgaaaattctttagcgtttgcttctgattttgtgacgtcggcatacatttttctgatgctggacaaatccggagtactcacaaaatgaacccataaaaacaatgacaatactaatttcatagttatatttttttgtacacattgctcagtttcagcgcaacggtgtcgttaaaataagtggtgtttttcaccttaaccaaatcttcttctgttgtaacaatatcaagttctaagcgtaattccggatttacttcgggattgattagcgccataaatttcacattggaaagtgtctgcatgatcaaagtacttttggtgatagactccgtaagttctttaataatctgaatcatgcaaactccaggcataatcggattgcccgggaaatgacctttgaaaacgtcgtgtttttcattgatcagaatcgaaattgtgtatttagaatctcctgttttttcttcggaaagaactttgtaaaagaattttaaaagcatattttttttatctgccaaaaggataagaaacacctatttgaaaactaacatttgtattataatctctaaaccaataatcattattgttaccgttgctgccgtaataatcactatcaagaacatccacaattccttttttgaaacgggcctcaaaagtcaatccggaaggtaatctataaccaatacccattataaaagccagatcaatatctgatttttcataaagcaagttgtcttgtaatctaaaatctaaagtgggcccagcctgaaactgaaagccattttttaaagtaaatttattgactacagcaatggaaagataatcaatttctaaatctttcgaactcacaacatcattgccattattataactgataaaagttttaacgttactcgctccttgctggctatacgtgatttccggttgtaaagtgtaaattttagtcaatttgatttcaccaaaacctccaatataaaaatcagttttatagtcggaacgtgtattggagaatgtagaaaaagaagctcctgctctcagaccaggtttaaaggtaacttgtgcctgtgaacttgttatggcaaacaaggccaatacgataattattaaatttcttttgttcatgatttaaattattttactttgaacgtgtaactaataccaatctggaaaacctgatttaaagtaatgtcatcataatagcgtctgttattatcattatcataatcatatccgtcgtagccataaatatcaactaatccttgtttcaatcgggcttcaaaagttaatccgtttggaagggtatatccaactccgccaacaatagcaaagtcaacatcaacagggttctcgccaaatttgtcaaaattatcattggtttttaaatctattgatggtcctgctaatacgtggaaaccttttcctttaaaattaaatttagccacagctccaagtgtaagatagttgatttcggctttctggcttctgcgacgggaagtattgttgtcaaaatctaagtaagacaaacgaatatcagcgccttgtctggaataatttaactcgggctgcagcgtaaaatatttattgaattttatagccattaacgcacccacataaaaatcagattttgaactgctattccccggcatattacttaaatccgatatatttaaacctccgcgtaatcccggactaacctttacctgggcatttgacgttataactccaatacataaaacaaaggcaattacggttatttttttcatttttggtttggtttaagtttaggtttagtttaaatttttactctgatttcaaataatttaattcaattttcagcttaatattttgatgattaatcaaaattttctccgcaaaaatattgttttctgaactaaatgtcagtgtaaatttttcttttgttttagaagactgaacgaccttttctaacttttggtcttttttggagacaaaaagatagttgtcacgtttttttccatcctgtgatttatagatgtcagctgattcgttttcgaattgttgttgaaagatataatcttttttcagcagcaagcgaaaatcttctcttaaggtattgataaggatttttcggtctagttcggatacaatcgaattgattttaaaggctgtttcagaaatctcaaaatccattaatttgttgccaaattctgttgtaaaaacaatacgatgtgtagtgtcattgatttttttggcgatgaaaattccagacatttcatggccgtaaaccgtaatgttggttttatacacgtaatcggtttttgaatctgcgaaataagggacctgataagacgttcggtctaattttttaggagtatagttttttgtgacagaaccacaagaaaccagaacaattgcaaggaagcaattaattagtaaaaactgaatcgtcgatttttgcattgatcactttatttttaagtacaattcgggtataatcttcagaggattctaagagttttacctgaacgacagttgcttcttctttgtcgaaagtcagttcaatttgtttgatgtatttttttaaagtggcatctttaggaacaaacttagcgatattctgtccctttgatttgaaataagaaatgacaaactccttatcgtcaaacatattaccgcttacgcttccgacaatcaatttgttgattctgccaaagattttactgttacccatatcaacggcacttttcttcccttcgtcgttaatcaggattttcccgtttttaaaaacaatgctgtaattgtatggtttcttgtattgccattgcagtaaagaaggttctttaaaaatcatttttcccgaagtctcaatatctttcgataaaaagtccaagtgtttgtactgaacaaaatcggtactcagggttttgatttttttggaaactacatttacatcctgcttgaaagcattaatttcggcatcagacattttttgttcctgagccaacaaattgcctgagataaataaaattaagagtgctattttagttttcatatttattacgaattgtgctttattagtttgctacagattaaaggattaaaatccgttttttatccgcgtcttcgcgtaagcgaatcagcttcatccgcgttcagttttcataagctttcagattcaaaagttcttcggttgaaattactttataattgttttgctgcaaaaattgcaaaaactgttccagtactaaaacagagtgtactcctgtgtcgtgcaaaagtacaattcctcccggagaaatacgttttatgattcgtttgaaaattaaactttggttggttgtgccaccgtccaatgaacgaatattccacccaattactttgtggccggtacgttttaaagctcttcggatggagggtgtcgtaaccccgtagggcgggcggaaaaaatttatttttttggaggtgtacttttctaaaagagcatccgttttctgaatttcagtcgtgatttttgtagcattgtaaaaatcaaaaaaaggagaatggctgtacgaatgattgccaaccaaatgtccttctgctataatttgttgtacgatttcaggatgagtttcgatgttttttccgatgcagaaaaaagtagctttgacctcatatttctttaaaagagtcaaaacttccggagtaaaaatagagggtccgtcatcaaaggtaatcgcaattttcttttgggtttccaatgaattattgcagtaagcttttacatgataattagaagaaattacagcagagcccacagcatttatgcctaaccaaattaaaacaattgcgataaaccatgctccgttaattgctgtatagagattcagaagaagcagtagcagcaatacaaagagaaagaataacgaaatgtttttatgcgttatcattttgaaagtaacgtaaaactatggttttttccgttgagctgattgtacaataaaatcgtattataagccggtctttcgactgaatttacttttataatttcagggatttcctgagtttttaaaattttagacgccatccataaagcaaaagccgaagcggtatcgtattcaccactcaaatgtttgtaatacaattgcggagtttgagcgaagtccttttgggttagatttttataataattttcaaaatctgcattaccgtcaaatcctaaaatcaaggcatcgacatctgaaatttctaattgattggatttcaaaaaagatctgattgcggcttcaatttcattttcttccagcgtatttagtaaggcaatgtccagtacttcagcataggtagtctcttttcgttcattttccagaacaaaaaaactggcaccttctccataaacggcaccgcctgtagtagcctctaaaaggttgtagggttgctggccgtctggtttgatacgtcctgacaatttaaaaagcgcagtagtgtaatcaccattttcatccacaccgcccacaagaacagactgtacttcttcttcctcaatttgcattttagcatctaaaagtgccgattcaaaagagacagctccattgacataggtaaaattgtaaccgttgcatttttgcaacaacgcaatttgagcgccaaccgtattatgtgtcgactggatgaatgaagttggtgttaagaattgctcattattatcgaggatgttggtcaggaatttttcagaatcttcaatacatcctaatcctgttccggtaataatggcatctacattttcaagttgtgcatctttcatggcaattgccgaggccacgattccatttttcacaccttttgccattcttcttatggcagcaggagaaatataatccttgtaaaccggcggaacgattttaagtacattctcgtcgaggttgtgtgtggcttcttctaaaaaaacagtatcaaatgttttttgagtcgaaatacaacctattccatttatatatgttttttttaattgcattttgagaagataagagtggaacagtttcctccaaacccaaaagagttagacagaacatgttcaatatttttattctttaaagtcgtttgcggttttaagtcaaactcttccattggagtttcaaaattcagattggggtaaaccacattattctgaatcgccagaacgctgtaaacagcttcaatggctgcagcagctgccaaagtatgtcctgtataaggttttgtcgaactaaaatcgggtactttttcatcaccgtaaattcgaagtatagctcttccttcagacaaatcattgttgggagtagctgttccgtgcacgttgatatagtcaatttcacttggttttaaacccgaaacgtcaaaggcttttttcatggccaggtaagcaccgtctccattttctgaagaagccgtttgatgaaaagcatcattggcattgccataacctgaaacacgggccagaacttttttgttttgtttctgaactacttcatcggattctaaaaccagaaaagcggctgcttcacccagatttagtccttttcggttgttgtcgaaaggtttgttgtaatcgtcagataaaatcatgagggttttgaatccgttgattgtaaattttgccagagcgtcggttccaccaacaattacgcggtccagtttcccggattttataagtcttgcacccagcataattgcgtttgctgccgatgaacaagcggtacttatggtggtaacaattccttttaaaccgagttcgtctgcaattttttcggctacatcgccagcatcatgacaagtaatgtatttgacaagttcaggatgtttgaaataatcgtaataatgcttttcggtcatatccatcccacccacgcttgtcgccgaaatgagtccggttctgaattcgtttatcgccgtgattccggcatttttaacagcctgtttcgctgcaaaagtgccaatcatcgcagtcctcgaaaagttattatcgggagtaagttctaattcctgaaccaattcatcattagtttttttaatttcacctaccttatttatagcagcgtgaatcgtttcaatgttttcgatacgcgttaccgcaactttattttcgattaacgaaatgtaattttcttcgactgaatttccaatcgaggagataattcccattccggttattgcaacaccttttttcatttagattattggattgttggattgttggattgttggactattctttttggtttataaaagttttaaaaactattttgaattagatttttgaatattttcatttaagaaatctaaaaacctgataatccaacaatctaaaaatctaaagagttctgttagcgctaatgtacgccgccatcgtttcgatggattgaaaaatggtttttccttcttttgggtctaccagtttaattccgtaatctttatctagaatcacgattaattcaagcgcatcaatggagtctaaacctaaaccatctccaaacaaaggatcgttatctgcaatatcttcgatcgcgatatcttcaaggtttaaagtagtaatgattttgttttttaattcttcttttaatgcttccatgattatttattgtataatgtattgatagtttcgttgttatattttgtactttcttccttgctaatggtgcaaagaaaagccttgtaatcgtcgttgaaaaattctacccagccacaaagaaccctgtcggctttatttgtattcagaagaatagtagaataattggacataaattcggtgttaaaggcatcaaatataaagaaagaattttcacttttcagctgatggcggatacttatttcgcccagacaaatatttggaagggtataaacaaaaactgccgggctcgggaagtagttttctttgtcggaaatagattcctgatacttaacatcggtatctaaactcgaggatttgttggccaaaaccaaggcaatattgttctccttttcatcagaagttatcggactcaaaagcagttcagctcctaaaaaagccagtttgctcaaggcatccattttgaaaaactttgggtattgcaggtcaaaattgcgataggcctgtttcgagaaattagcaaaatctgtgggttcaattttgaatatcgaagtcccgttcaaaacaatttcgttgttttcgatggtacaataggattgtatgttagttttgtttggattcattattttaatttaacactaattgcacaaattagcacgaattgatttggggtttaaattacactaattaatctgtgaaaattagtgcaattcgtggctaattattttttactttttcaaatatcaccgccgtattacaacctccaaatccagaagctgtttttaggaaaaaatcaattgtcttttcttcatttttctcaataacattgattggttcgctaaccccaatttcatcaaaaccttttgattcaaaaagcttattttgattggcagattcaatggaaattaccgtttctaacaatcccgaagcgcctaaggtatggccataaaatcctttcagactattgactggggcattttgtaaacctaaacggtttagggcaatggcttccatttcgtcgttgaaaggcgttgcggttccgtgtgctgaaatataatcgatttttgcagcttcaatttgagcttctttcaaagcattttgaatacttctgaacaaaccttcaccggttctcgatggacccgaaatatgattggcatcgtttatcgaactgtctccgataacttttattttggcatttgcagtttcggcggtaactaacactgcggctgtcgcttctcctaaacttacaccggttctgtttttagaatacggtttgcatggtaaatcgctcatagcctgaaaagcattaaaaccagacaaaacaaattctgaaacttcgtcacccgctacaacaaaagcatggtcataaagacctgactgaatcattcttttggcaacagaaatggctaaaattccggatacacaggcattcgaaaccacaatgggcggtgtttgaaatccgaaaaaaacggcaacattttttgccaaaacatctaaatgtgcattagtaaaactgtcaacagaatcattttttaaagcggttacatttcctttggttgtcgaaaggataaaggctgctttggaatttagttcaactcccgagtttttgataatcggttctaaagccaaaatcatcattttctctaaacgggagtattttgtttctgtacttatttttgcgaaggcactgtttattttttcatcagaaataatagaagcataaaatgaattgggcattaaagaaatatcattttgaagctgaataccggaatctcctcgaagaattgcttcaacgtttgattcgacatcaaaacctaatggtgtgatgcagttggtttgcgtgatgtatatttctcttaacattttatgattttaatttcgtgaaatttttgctcgcagatttggcagattgagcagattccgattttaattttttctaattcgtgaattcgtggctaaaattttactttaataaccccacttttcgtttccattcttcgtaaaaaggaggattggtcagcattagatttccttcctgatctaaaaaaacctgaacggtttctccggtgcaggccacttcacctttatcgtccagtattctgaaacgatagatcatttttgcagcgggtgtgtcaattaccgtagtttctatggttaccacatcgccataacgcaaagacaatttgtgttcgcattttgattttacgattggagttgtgtagcctgttttggcaatgtccaaatacgtaagtccgtgttcgcgtccaaaagcttcacgtccgtcttcaaaataggtgatataattgccgtgccacacgattccaagcggatccgtttcgttaaaacgaatcctgatttcatgcgaaacggttagttcggttgcttcgttaaactgttcttttctttttgtcataaaataaggcaatggatgttgtgataataaagaacaaaaataacaaacttatttttgggatgatttcaaggaaagatacgttgcgaagtaaaacatcatagaaagcttctaatccccagttcataggtgatgatttagcaataagctgcatgatccccggcattgcaaaaacgggaacccagattccgccaatcgccgccagaataataacacttgtcgcaccaaagggagccgattgttcctgcgtgcttgcgaccgttcccaataaaattccgaaaccaatagccgcgaaacctgaaaataaggctacaacactcattaaaaataaatggccttcaatatttaaagaaggtaaaccaatatgtggaaacaaaaagactgcgaccgccaccatcatgtaaaactgtatcatacaaatgacagagtaggtgatggttttaccaattataaccacaatattagaaaccggattggtcaataaacgaacaaaggttccctgtgatttttcttttacaatattgatagataaaggaattacaataaagaatatagcaaaaagggtccaggccggaacattatgctgcacggagtttggacgcacttctttgttgtttatttttggaataatttctttaaaggtgatgaaacttttttgttcaaattcggcatttccttctcccagctgattttgaaaagtggtataaatagacttggtttcgatctgtgaaatcatcttatcgatggaactcatcacggcattcttgaagctcatttgaaccgcaggatcaaaatacaatttaacttctttttctttaattactttcggttttttggcttgagccgaagtatctgtttctgttagccccattttgctcacaatgttttcgacattctgatcaattttggtttgcagatcaacacttagtttttccggaattacaatggccagctgaaactttcctttgtaaacggcttccctggcaatttcttccgtaatgggtttatgatcaatttgtgtgaccacactaaaaagctgacttttctccagattatcaaaaacggttttagacactgaacctttatcgttatcaaccagtaaaatctgaattttgttatcgctaacggttttgaaagtactgtcctgaatcaaggttacggtaatcaccaaaaccaaaggcatgatgaataaaatgatcaaaccgcccagatctcgtttgagcaggagaaattcttttacgaccgacatccaaattttatataccatctctaaagtctttaccggttaatgaaataaaaacttcttcaagattacgagcttcttcagtagaagcaattaggctcgaaggtgtaccttgggcataaattctgccgcggtctaaaatggcaatatgagtacagaaatcttccgcttctgctaaatggtgtgaggtatagataatggtggttccgttttgatttaagaattttaaatagtctatgatggcatttttcgattgaacgtcaacacccacggttggttcgtctaaaaacaaaactttgggattgtgtaaaattccggcaatcaaattgactctgcgcttcataccgcctgagaaagtctcaatacgcttgtcggcaaattttaataatcctaaaagatctaaggtttcaatgaccttgtcttttagataattgccttttagtccgtacatgcttccaaaataatgtaaattttcccgggctgttagggtagggtataaagcatactcctgagggacaacgccaattatttttttgattttggaggaatgatgggtataattcagactatcaatagtgaaatgtcctgaagttggtttgatcagtccgcaaagcatggagattaaagtggtttttccggcaccattaggccccaataacccaaaaatctgaccttgattaatctccagcgaaacatcgttcaaagaatacagatctgcatttttgtactttttcgaaagggattctatttttattatggattgcaaaatattcttagctaatagctttttttagttttttgaaaaagatttcttcacgattggcaatgtccagtagttcatcggcaattgtattgtaggcatcttctttggcgcttctgtttttgtaaattcttgaggcttcaacggcaaaatcacgccatgaatcaccgatttgtgtcatctcttttgaaagggattttaattcttcattgttcagaataactgaagcttcctgtaaaaaagcggcataaataaatcggaaacctccgcctcctgtacctatttcttcctgcatacgaaccatttgtgccaaatagtgattggcttttttagtaccgtgttttacaggccatcttcggatttgtttggaaacaaatttgattccgcggacacccacaataggcattggtgccaacatatcgcggcaggtatttttgattccttttataatggcgctttttaaatcaacgtccttcggaatttgaatcggatagtacatttgtcctcttggtgcaaaagctcctttggcaaaacggaccttgtccagttcgtcatgtgtcagggtggtaacggtttccattacaggatcactcaccagataatcggtttcggtttttccgtaaaccactaaattgtgtgcgttaaaatgaaagcggtattcatcagggaaataactcaaatggtacacgccaacttgtaatccggttggaatattattttttaaattttcatctaaggccttgttggcatttattacagaggaaaatttttgtctttttatttttaagtttaaacggctcgccagtttgttaaaaatctgtccgggcaaagttctgtaactaatggccggagcgtgattgacttttataaacggcaggtatacgaagaaaagtccggagccaataccaaaaaccattggttcactgatattcagtccgttgttttttaacaaattcgaagctactccattttcgcaatgagcagattgatgatgtgtaaaattagtttgcattacgcggttttaatattttttaattcagctattgaaatttcaaaagcatcggcatatttctgtaaagtagtgttgctcaattgggcaaaaacagagggtttaaaatgtctttttacacgccatttccacattccaacataactggaaagaatggtgagatccattttattaagttccatataataacaaatcggacttacttcacctatttctacctgttgttttgcttcggcaattcgttcgtttatgtcatcgatcgaattggatagtgcaatggttttaggttcccaaccagtacttaaagttgtggtatagtcaccattttcatcggtggcgtaaagcagttctttgagattatttttggttaaattgccgttgtcttgtggtactttttctttttccatggcctttttattttcgggagaagttatgaaatagccgaaattgtttgttgaatgaacagattaatttcgcattctaaaagtattttgtcatcaactaaactttcgcaactcatggtgcataaagtataatcgtcacccgcaaattttgaaactaaatttgctttggtaataatagtgtcattaacttttggcagcgcatgtattttcagattctttatagcactgatgaaaccaattacatttacgttttcattttctgtcccgtcatcgtcaaaaaaatattttttgcctacaattgaggaacaggtttgtgcggtgttttcgatgagcccggcttcaataaaaatgttgttgtcaacaaaaatattgtcttcacggatcaaaaaggtggtttctacaaaactggaatttatatccaaaattaaatccaccataagcagtggcgctcggtggggcagatagttttgtatgtcgactccggttttcattcctatttatattatttggctaaaacggtcttcatttgtccgttcgcaatttcttcattattcagatacgttacgatgtctaccagagtaattccggcaaactcctgtaaaatagttatggtcgattgaattgagtcgttgactttgggtaacttttttatttcaatttctttgatcgatccaatgtagcctgttggggctgtttcgttttttaggaaaaattgatagcctgtgtgcaaagccacagattgcgccatatgctcgattaaacccgcttctaaaaaggtatcgttgtcggaaaaaatattatcgttttcaatttttaatcccgcaaccaatgaggtctcagtaaacgaatacattttatcaaccataacaaaaggaaacttttgaggcaataaattttcgacagcgtttttttctaaaagtaaagaggtttccattagcaaacagttaaataagcatacgcaaaagagaatcttccgctttccggaacagataatagaatacgttctccttttttcaaatttcctgaattcattaattcttccaaagctaagtaaatagaggcagaaccaacatttccaactcttgaaagattcatgaaccatttttcatcggccataccgattcctttttcattcagtcctttttttagtccttccacaaaaaagtttgaagaaacgtgagggataaaataatcgacatgatctgatgtgatcttgtttttatccatagcatctttcatactttctgctcctttggaaagaataaactcgtccagtaatttcacatcttgtttgatggcaaaaaccgattcgtttaaccattgttccggtgcataatcgctccaggctttgatctcaccattttctaatttatcaccaccggcatacatacaggtttctaattcgtaagcatacgaaaaggcttccatccactcaatttttaaggagatcgctccttttggttggttttctaataaaaacgctcctgcaccatcagataacatccagcgtaaaaaatcttttttgaaggcaatgatgggctgttcttccagatttttcaaattagccgcttcgtggttgtacatttgggcattgagccaggtcgaaactttttcagatcccgtacaaatggcatttttagagtttccggattttacagacaggaaaccaaattttaaagaattcatacctgcacagcaaactcctgttgaagaatttagttctacagatttgtttttcaataaaccatgtaccatcgcagcatgcgaaggaaggaagatatcaggtgttgaggttccgcaggaaaggacttcaagatccagtgctgtaaagttttcatcaaacaattgcagaattgcatttcgggttaactcggcgttgttatgcgtgctttttccggacttatctattgcgtaataacgagttgtgattttattattgcgcaaaataatacgtcttgctttagaggcagcatcattaatgaggcctaaataactttccatctcatcattagaaatggcttcatttggcaaatactttgcggctttggtaatatatacttcaaacataatctaatttcgtcttctaaactccttgataatattgagtttctctttttatggtatttaacttaaaggggtaggtaataaggtgcaatatatacactattggcgagattaaccatattgcaaggaataaataaacattaaatactttaagaagtgtttttctgtttttttgatttttataaatcagattcgaccacttattaaagattttatttgccgttttatcaacggtgaccaaataagggctaattttaacagcatcaatggcaactaatttgggctgtaagttctgtaattgattttgcttaaattcagaaagtatcgtttctccaaatttatcggactccagtatgtctttttctgatactcccggcagtggaaaaataccaagatattttttctttacgcccgaaaacatccattctacaatcgtaattacactgattaaatttccaacacgatctactaaagccacatttccaacaagctgagcattggcttcttttagtaaaactttgattttttcctgtgccataatccacatattacgagagccgcttatggtgataacaggtgtgttgtttaatatttttttggcttcggcacttttcagaaaagagttaatcggaatagaaggggacaaataccaaacctgatagtgaaacaataccagatcgtatttagtgtttagaatttcttccggaaccggttttagttcggttggaatttgcagaaatgattccgggaaagcatcgaaaaaagagtctttatcccatggaaaaggaaaagttttctgcagttgtatttcgtgaaaagttacattgatctcccctgaattcaggaagggttttgcaatatttcgtgcaattgttcccagttgtccagactgcgtataataaattacgagaacatttttcattgtggtatacttgcttttggttgcgaacaaaaataggtaaatttatttaaacgaattttcttgtttaaatgaattgtttttgggccacagatttttgttgggttttttaatctcgcaaaggtacagagacgcaaagttttaatttgaaatgaatttttaagtacagtttgtcatttcgaccgaagggagaaatcacacaagaaactccgcaaactaagtcgacaatctttgtgactaaacgggtgtgatttctcccttcggtcgaaatgacaaaacggagtaaaactttgcgacttcgcgtctctgcgagattttttaagttttatttcagattattccagaaatcgaaataattgaaccattgcagcggatatttttgcagaatagtctcaacgctttgtacatattctttcagcaatcctttttcatcacgatgtttcgaggcagcttctctggcgtacaaatgataatgtaagttaggttctttcattacataaacaaaaacaacaggaacttttaatcgtgaagcaattaaaaacggacccgcaggaaaattggcttccttacccaataggttttccgaaagagatttggtgccttcaaagtaacgatcgccggtaaaacaaaccagttcgttattggttaaagcagcattgatctcaaaaatatgagacaaatcgtctttaataatgataaattttacggtaggtttttgggtaacgctttccagatagttttttatagcagaatgttccaaatcggtagtaaccagattgatttgaaaattaagatcaatatcacccaggaaatgttcggcaatttcgaaatttccaacatgagcactaattaaaacacctccttttttctcggccaagagttttttcagtacctcaattccgtcaaattcataagtgaatctgtttcgcattcctgccgaaatggaaattttatcaatgatcgtctgtccaaaagtatagtaacttttgaagaccatttttttagatttgaaccaggaatattgaagcctttctttaaagtaatagaaaatggctttgttgcttttttttaaaaacaaaaagtaatatgaagcaacaaaataaagcaggacataagcagccttaatacccgctttttgtattaaaaaaacgaatattctatagcctaaaactgttccctttgatttgccatcccattgactcattaaacagctttagcttttagtttggtttcaataaggtcataaaaattctgaaaagtagcaattccaacaaaatcagcttctaccagttttacaccaaagttagattcgatcgagactactaaatctacataatctaaactatctaatccaagtgtctcttttaaattagcatccggttcgatatcatcattgtctacttcaaattcatcaaccaaaaaaccattaatttttgctataatctcttctttattcatcgctcaatttaaactttttaaccaccaacgcagagttggttcctccgaatccgaaggaattggacaaaaatatgtcaaattttttgtttaaagtagttttgaccaaatttaatttagcagcatcttcgtcaggattttctaaattgatgtttggagcaatgaaatcgtgctgcatcattaagatagagtagattacttcgcttgctcctgccatccagcattcgtgacctgtcatcgatttggtagaacttacatagggatttctctctccgaaaacttcgaaaatggctttagcttcatttccgtctccaacaggagttgaggttgcatgagcatttatataatcaacatccgctgcttttagctgtgcatcgtcaagtgctcgttgcatggctatagacggcccttcaacattaggcgtcgagatgtgtccgccgtttgaagagaatccgtaacccgcaacttcggcaatgatggttgcgcctctggcaatagccgattcatagctctccagaattaatgttgcaccaccaccactcggaattaatccgtcgcggtccttgtcgaacggacgggaagctttttccggttcgttttctctggccgaaaaaacacctaaaccatcaaaactgctcatcgcatatttattgatttcctgtgcgcctccacagatgataacgtcctgaaatccgcttttgattaaaaaataagcaagtcctatagagtgtgatccgctggcacaggctgcacttacagtaagattgataccgcgaagtttaaaaatcgtcgataaattcatggttaccgttgaattcatcgatttaaaaatagcacctgaacctattaaagcggtgtcttttttatctctgacaatatcagtagcttcaataacagcttttgatacactgtcatttccgtacataattcccacttcgcgttcttcaaaaaaggcatcatctatattcgcatttttcaatgcttcgattgttgccatataagcgtactcggtctcttcaccaatgctcattcgctgtctgcgggtcaataaattttttaaatcagccttcggaaccattcccgtcagggccgattggaaaccaaattcttttctttcagaatcaaactgaatacctgattttccctggtataaagattcctttacttcatctaaagaagttccgatacaagaataaattcccattccagtaattacaactcttttattcatggtggtatttcaaagtattttctatcctaagtgtattttttgaagtttttttaataaaactttgcgactctgcgtctttgtgagcaatttttgacgtttaaaaaacttaaaacaatctcacaaacataggattattaagaatatattcctccatttatattgataatctctcctgtaatgtaacttgatttttttgaaatcaaaaagcttaccaaatctgcaacttcctcagcttctccaaaacggtttaccggaatcagctttaataattctttttcatccagttcactggtcatgtccgttttaataaaaccgggtgcaacagcatttacagtaatatttcgtttggcaacttcctgggccagtgctttggttgctgcgacaattgcgccttttgctgccgaataattcgtttgtccggctgttcctttcactcctgaaacggaaaccatattaacaattcggccgtatttattgcgtagcattttttgaataaaaaactgcgtaacattaaaaaaaccattcaaactggtgtttactacaccattccagtcttcgggactcatccacataaaaagaccgtcttttgtaattccggcattgtttacaattgcttctacaattgcttccggattagcttcctgccattgtgttaatgttttttgtacatcttcaaaattggaaacatcaaaacctaaaatttctcccgttgctcctagtttttgtatttcctgaagggttacttcagcagctgttttattcgagtgatagttaatcaggatatgataatttgcatcaacggctaattttttacaaatagcacttccaattcctcgtgaaccgccagttactaatacacatttcatattcagaatttatttttatttgttcgatataaaatcactttttgattagcaatttcatatgcaaaacgtataggttaataggttttatttcttctttttggctaccggttttttggtagtttttgtctctgacttttcagtcgttttcatttctgcttttggtttctctgcagtgatttctgctgtgctgattctttcttttgattgtgaaaacagttcagcattttcaaaccattggttgcctaatacagttccgtctggttttaagaatccccattttccttcattttttactcgggccagaccatcgataaagcctttgtcttgttttacgaacagcgcaataacaaaaccatttgctgtaatattgtattgggttggaataactaattttccggtttgattgatgaatccccagtttttttcttttaccggagccagtccgtcagcactaaaaacttcggcatcgctgtaggtaggttcgattacaaattcagctttcggattgatatacccccattttgaacctacgcaaaccggagctaaactttttgaaaacgctttcaccttgtcataaattggagtaattacccaatttccttttaagtcaatgaatccaattttgccatttttcttggcgtatgtaagatcctgcgtgtcaaagtcccagattttttcagctccgtcaacaggaataaaacttcctgaactgactattccaaaggttttatcttttcttgcccagcttgtgtttttgaaataattgcctatttcttcatacgcaggctcgatcatttctttaccggaagtattaataattccccattttttattgttttcaactctggcaaaaccgttttcaaatgatttgatctgatcgtattttggttctaaaacaacggtcatttttgaattgattaatcctactttgccattttgtcgaatgaacgctacgccattttcgaaatcaaaaagtttgtctgacacaggagcgttctgaatttctcctttcgtattgatataaacccagtctttgtctttttgtacaactgcaattccgctgttgaaatctttaacatttttaaaatctgccggaattacccaggctcctttagcatctataaacccccattttccattattttccacagctgccaatccttcagaaaagcttcttgcggatttgtactgaggttcaattttaaaatttccgtctttggaaagatatccaatttttgaatcttttttaactaacgccaattcctgactattaacaaattgaatagtgaatgcaaataaaataataagtgtctttttcatgattttaaaggttcaatattaataatgtaaaaataagtattaactgtgaatcaggtaatcttttactttctgaacaaaaggatacatcacctgatcttctttaaattcaggaataatgtttcgaacatcgtcgtaccattttttggtaacggatgaaattttatctttttgtcctaaataatcaatagcctgaacgatggtgatcatttcgatacctaaaacttcaaatgagttttcgattacttttgaagtaataacggcagcattggttcccatacttacaatgtcctgattgtcgttgttgttcgggatactgtgaacgtacattgggttagacaacatctgactttcggcagtggttgaagtagcggtaaactgaaccccctgcattccgaaattgaatcctaaagttcctaagttaacaaacggaggaaggatttcgttgatttttgaattcagtaaataattcagctgacgttcagccaacatcgttaatttggtaataacaatttttagtttatccatttcaagcgagatataatcgccgtggaaatttcctccgtgataaacgtgtttgttttttacatctataataggattgtcgtttgccgagttaaattcgtcttcaagaattgaagcgacattgtttatagtttctaaaaccggtcctaaaatttgaggaacacaacgcaaagaatagtattcctgaactttttctttgaagatttcttcggtgttttctccggaatataagtgatcttctcttttacggatcaaggtactgtctgaaagattttgtctcattcttgaggctacttcctgttgtcctttatgacgtttggtttggtttaattcttcagagaaatgatcgtcgtaggcctgaaccaattcgttgattgcgcaggaacattttaaagaccagtctaataattttttggcaagatgtacatttaccactccaattccggtcattacggaagttccgttgattaaagcaagaccttctctgatttctacctgaataggttttaaaccttcaatttcgaaaacttcagcagttggtcttcggtctcctttataaaaaacttcgccttcgccaattaaaaccaaagctaagtgtgataattgtactaaatctccgctggcacctacaccgccatgctcaaaaataagaggagtaatgtctttgttgatcagctctgccatcaggtgaattacagaaggatgaacccctgaattacctaatgataaagtgtttaaacgagccaaaattgctgctttcgcacaaacggggcttaaaggttttcccgttcctgaagagtggcttcggattaaattgtattgtaattgtatttgatcagattctttaattctatattgtgccattggtccgaaaccagtgttgacaccatatattactttgtttcctgaaaattcttttaggaaattgaagctttcattcactctgtttaaaacaatatcgctgatgacaactttattatttccaaaaataatagactcgaattctgctaaacttaaatattcattaattgtgttcattaaatcgtttttggttgtgctaatttaattttatttatcaaaataaatgtagttattttgatgatggcaaatgtaggttaataattgataataatattaatatgataaaggagtttgttgatgttttagtcattggcgcaggaccatcaggatgtgtctcggcatcgtatcttcacaaaaacaacattaagataaaagtagttgaaaaaacaaaatttccaagacttgtagtaggggaaagtcttatccctcgagtaatggatcattttgctgaggctgagctttttgagagtttggatgcgatgaattttgagaaaaaacttggcgctcgttttatcagaggagaagaaatttgtgtttttgatttcagcaaaaaatttggtgaaggctgggactggacctggcaggtaccgcgagctgattttgacaacaccatggcgcaggaagtgattagaaaaggaattgatctggaatttgaaacagaggttctggaggtttcttttgagggtaaaaactctaaaacaattgtaaaagataaggatggaaacctaaaagaaatacacgctaaattcattattgattccagtggatacggccgtgttttaccaagacttttagacttggataccccgtcaaaactagatccgcattcttcgatatttacacatgtaaaagatattaacagagaagaaggagaagagggaacccaaatttcctttgatattctggaaaccgaagtttggttatgggtaattcctttctccaacggaaatacgagtctgggggttgtaggaccaaccgattttattaattcactttcagaaaataaagataatgccgaggctttaaggaatgcgattcagaaatcggattattatattaaaagatttaaaggaaccgaatttttatttgagccggtaaaattggagaattattcaagagcggtaaaaagaatgtacggtgatggttttgccttaacaggaaacagttctgaatttttagatccggtattttcttctggagtggcctttgcaaccgaatccggaatgctggcggccaaattgtaccttaaagaatctcagggaatcgaagtggattgggaaacagaattcaccggatatatgaaaagggggatagctgtttttaccacatatgtacaggaatggtacaccgggaatcttcagactttgttttttcatcagccggaaaatccggatgtgaaagaaaagatttgttcggtattggcgggatatgtctggaacgaagaaaatccttttgtgaagaaacacgatcatgtaattaaaaatatggcgtatttactcaatatgcaaaaagaacaaagccctgaataatcagggctttttgtttaggtgattgtttctattgcagttatatttcgcccttacagggctctaatttataaataaaccttttatttctataaatatgttattcctccgggatataaaaaagggaagtagttttttagttagaaaattattattgtctgctccgtcggagcaaaatatttgtaataaatagatttatacggggaagaaagcaccagcggattgctccagcggagcaaaatatttatagattccggaggagcggcatattttaggttttattgttttttaaaatcaatatagggaaataaagaggagagctgtcataaaacagctctcctcttatcgttttatttataagctttttttgcaataagtttagacattgattttgctgttttggcgaaaccttcaccaattctggtttcgttgctgaaattactgccccattgatcacccggagcttcttcgcttgtgatttctaaaaggacatttgatttattagcagtttcaacaaactttaagttggtcgttacttttgcgggttgtttcataattcctgcatcccaacccggatagatccataccgcagtcacgattaaagtataaggagtttttaaattttcctgaaagttcaaatcctttttttctttggttaaaacaatattggcaatttctaaaaatttaggagtccagatttggtcttttgcactaatccattttttttcccagatgtttccgttgccttttgccttttgatctaactcggctttatgctcctggacatactgtgcttccaattttttttctttcatcatcgtaaagttgctgtaatcaaattcggtattgatttctttttgatcttttaagaaatcaaagtttccttttactacttccatgtcctgtgcaaaagctgctccggaaataataaataaagcaaagattaattttttcattttttgttttgtttttggttattagtgtgttaaaagtaattaaaatgtttgtataaatatttttcctgttaaaataaaatcatctacacgctaaagttcaaaaatgttttttacgcaaggaacgcagaaacatcttatcagtaaccaatatcaaaatgctgtgtccaaattagcattacaaaaaggaacgcggattacgcagattcgtttcacaaaaacgctgacaaaaacggattcattaggaataaaaattattctctaaccaataataaaaaatccgtgctgatccgtgctttcgtgaaacgaatccgtgtgttatttttttaaccgcaaagagcgcaaaggtttacgcaaggaacgctaatgaaaacagatttgttaggaataaaaattattttttacccaataataaaaaatccgtgctgatccgtgctttcgcaaagcgaatccgtataatccgtgggctattttttaaccgcaaagcacgcaaaggttctcgtatggaaacagatacatcaaaacaaaaaaggaggcgttcactaacgcctccttttatttatattaattaaaaaataattttaggtttaagatcctgtttaattttttaatattttgttggaaatctttttaccattttcaagttttacagctactatgtaccagccgtttttaagttcggagagattgattttagttttatttttcagggtgataacattttcaccattcatatcaaaaacatatacgacttcaactttttctttggtgtcgatgcttagctcttccttaacggggttcgggtagataatcagagaggaattaaaagttagatcatcatttagagcagtagcactggttgtgctagtgccggaagtttgattgatataataatcctgtaacttttgaatccaaaaatgatcatcagttagcgtagttcccgggtttccaattccatccgtactggctcctacaccagctcccattaacacaagtttggttccgctactttttacctctgcaaagtgatttccaaaagtcacttttttggtggtgggattaaccagaagtttagggtcggcatgtttattctgactgaaatagttataacgagttgcgtcatttgagaaatttacggtatccccaaagaaaaaagtagaagcagaatcttcgtagtgctggctggtattatttaaaatttggaaaggacctgctgttcgttcatttacggtttctgaaccattgatatgtcctaccgggatttgccagaggacaacatgtttgccagaggcttcgtaaagtttttgaacaaaattcaggtaattcatccagtggtcattattccagaaccaggtataagagaatggatcggcggggtttccggtacttccggcacccatagcatcaagaccatatttgtcaatagaaataaagtctgcattattagacataattcccatactattggtgtactgaaaaatatctgtagcggtttgtttaattttgttaagctgggtagtaaaggtcccggtatccgtttctctgataattccttttggaccggctacaccagattttgcccaaagattaagctgccatccaaattccatattcaggttttcgtcagttcttttcttgttgagctcaaaattgattctttctaccagggtttttaatgtacctgcattttgggcaatacttgttgcatttacggctgttgtagtcgttataggttcgttaaactgctgcatatagcccagaaaatcaggttctaataccactccaaaaaactcatctcccagttccgctttaacctgattcagaaaaaggttgagattattgaaataagccgtcatataggaaggatcttttacgtgtgccagatccagctcgtaagattcgcttccgtcgggaatgttataaaaaacaaagaaaggaataagccccattttcaaagaattccgtgcaaattttatagctctgtcaggctgccaggtattccatccggctattggccctccattgatatagatgtatcgcacatccattctgttgtttttgagcagattgctatcgtcgatattgttgttgtaaaaattgacatcgtcggtagtgtcttcggatacagatcctacagaaacataatcaggatattttaacacactcccattggcattgtctattcttaaaccaagataatatatcgtaccatctgaagtggttatctgaagtccggatctgcctgcttttttagggataatctttaaagtatttccggtaatagtataatcaaatacagtagtgtttcttctttttaaggaagtgatagccttatcgaatacgaatgttttaggtattccattaaccgcttttatttgatttggaagtgaagcaaaggaaatattttgtgtggcaggattcacaatagtaagttgtaaaccggttgttgctatggtcccattgttgtctgtgactgctatttgcagtgaattgtttccataattctgaggggtccaattaaaggtataagaattttgtggattggtggtcacattagcattagttccggcggtgagatctttaaacagtatgctgctaatggaacttccggacgaaggctgaatagtaaaagtaatgcttataggcgaaaaattaagttgagtataggaagtcgcgtttggcggaccggtaatcgttatcacagcaggagcagtaatcgcaattttaatagttgtgttgactacagtgcttattccaatcgaatttacagtggtatatcgaatgttgtaatctccataagcggtcggggtccagttgtacgatatcgtgttaccggataaactcatattgtaagttgtataagaagactctgttgtcttttttatttcgaccttattttgtgttgccgaaaaaccgtacagattgagtgatgcggtgagattgatagccgataatgtgctttttataataatttgcccatcggcgtaggcaggagaaatagctatgggcttgatgcacacaccaagaaaagtgtaagcagaagactgatcaggaatttctgttccggccacccagtacttggctttgtagacaccattgttgtatcgtataatgttgtttacattatagttgggtgttgcgctgttccaatcagaaacggtattgcaggcagtataagccagagatggattattgataattaattgctcgtcacagcttcctactgccaaccagacactgcttgatccaggtgtgctgccggctccctgagaccaggaattgtttttgtacactatattattgtaacggacataagagttactggagtattgtgtgaccgaataccaagctggaattccacaggagctgcctaattgggctttagccatagttggaataaaacagacaagaaaagagaagaataaaagtttataattttttatcatagtaaaaacatttaatacgttatacattccgttaattgtgattgtttgaaaaaacgtatcgtttttgtctctttaaatttggtacctaaagtttaaagattaaccatacgcaaatcaaatatagtaagaaattactttgtacaaataatcaatattgtaagtaaaatatttgaatttcagtgatttggtttttttattttgaaaaaaaggcaaagaatttggtgatgaagattttgtgggaaatagtgtaaaataaggcggtgacctacaataattaaaaacccgacaagctctaaaacttgtcgggtttaataaaatttggcgcgtaaaagcctgattaacaatggttaaaaaagtaggttttttctaaattaataacataatatttaaaaaatgtgattttcccggtacggttttatttttcaaaaaagaatagaataaaactaccaaaatttaatgtacagggccgcaataatcaataatgtaatgacgattaaaacagtcgtttgtggttttactttaaacatttcggcatcgatttcgaatgctttaggattcactttaggacctgcaaaactgattaaaaccattaccaaggtggtaaagacgaacgataatcccatacaaatatgaaaaggaatttcaaaagctccttttccgtttggataagcagtgtacaatagcgtttcatttccaaataaggcaggagcatattcgttgaatagtacggataatacaaaacctaaaattacgcctactacagctgcagctcccgtagttcgtttccagaacattcctaaaacgaacatggcaaaaactcccggactgataaagcccgtgtatttttggatataggtaaatccgccaacacctccaattcctaaaatatcattccaggtaaataatactgctaaaagcatcgctccaaaaacggcaattcttccaatgtttacctgctgtttttcaccagcttctttttgaatgtattttttgtgaatatccaaagtgtagattgtcgagatactgttgacttttccggctaacgaagctacaattgctgcggttagtgccgctacggaaagcccctttaatccggttggaaggaaagtcagtacggcagaataagctccgtcttttcctccgactaattgtggtaaatgcccgttttgatacaaaacataggcagcaatacccggtaacattacgattaaaggcattaacaatttgagcataccggcaaacaaaataccggtgcgtgccgtttgtaaatcggcacccagggctctttgcgtaatgtattggttacatccccagtaattcaggttgatgatccagataccggcaagataagacatcagaccagggaaagttaggtatttgttgatatcaagctgagaggatgttgcagttggtcttggaataatcattttaaaatgttccggtgcttctctcattaaaactttgaatccggcaattgcattttgtccgactccaaaatattgtcctacggtggtaagagcaatatacgaggttactaaacctccaatgattaaaacggccacctgaataacatcggtataagcaacaactttcattcctccaagagagatgaataaggcaaacaatgctagtccgatcatgataatatgcagatattctccgccggccataccgtttatggccacagctcctaaatataaaatagaagttaagtttacaaaaacgtacaagaacagccagaaaacagccatgattaaagcagtagaatcattataacgtgtttttaagaattgtggcatcgtatagattttattctttaggtatacgggaataaaccaaacggcgaccacaataagacttatggctgcaatccattcataagccgcaacggcaattcctaaaaagaaaccttcaccactcattccgataaattgctctgccgagatatttgaagcaattaaagaagctccaatagcccaccaggtcaggtttccctcggccaaaaaataagctttagcatcctgttcgtcttgtttacgttttcggtaaaccgtataaccgtaggccgaaactacgatgaagtaaataataaaaaccgcataatctgcgaaagcaaggttctggttcattgatagtactatttttaataattagatagtgattgtttgattagtagagggtaaaaaacaatatttgtctgaggtggtttaaatattgttttttttatttttttgatttgggttgaatattcgtttttgatttgatttattaatgtgattctgtattaaagggtaaaaaagagctaagaagtacctgtttttttgagtatgtttttcaaagctgtaacaatttgtggggcaaaataggctaaagtcttattttatttttgtttgtaatgaatgtctgattgctgtcttaaaacttcggcacatctttcaggggtaatgtctctctgagattcgcctaacatttcataacccaccataaatttctttactgtggctgatcgcaacaaaggcggatagaaatgcatgtgaaaatgccattccgggtgttctaaaccatctgtaggtgattgatggattcctgatgaatacggaaaagaagtactgaataaattatcgtatttgatggtaagttgttttaaaattacggcaaaggaattggtttcttcttccgtgaaatcagtaattttattgacaactcttttacttacaatcatcgtttcgtaaggccaggttgcccaaaacggaactaaagcaataaaatcatcgttttcgattactacacgatcaccggtttttaattctgcctgaacataatcctgaagaagcgttcggttgtttttatcaaaataagatttcagattggtttgtgttctttcaacctgagttggaagtgacgactgtgcccagatctgaccatgcggatgcggattactgcagcccataatacttcctttgttttcaaaaatctgaacgtgattgatgtatttgatgcttcccagttcggcgtattctttttgccagacttttacaatgctctcaattccctcgatttccatctccggtaaagtaagatcatgtcttggtgaaaaacagactacttttgaaattccctgttcgggttttgttttaaaaaaagtgtgcttgatgtcttcttcaaatataatttcgtcctgcttcattgcggcgaaatcattttcaaagacaaagctgtctttgtaggtcggattgtgttctccattagcgcgaacgttacccggacagagataacagtttgggtcgtgctttggaagagtttcagttgcaagagtctcgttttgcccttgccacggacgttttgctcgatgaggtgataccagaatccattcgtttagtaatggattgaaacgtctgtgcggatcttcgttgatgtcaaagtttttcatttatagtttttgtgatgttaaagaagtagtcttgttccattagagattgttacatcataaaattttaattcaatcccaaatgtatttaaataaagatttgaaaacttatttttcacctcattttcatgccctttttttataaaatttatggtacaccccccgaaaccaccccccatgaggcgtgatccaacaataaaatcgtccgtttttgccgtatttactagcatatccagctctttacagctaacttcgtattcttgcgataaaccataatgggcttcgaaaagtaactgtcctaaaagtgtaatatttccctgatctaacgcttcacaagctttttcaacacgattaatttcttttactacaaaatgtgctcttttaaaaatagttgctgacatttgatgctgcagcgtcaaaagctgttcttccgtacaatctctaaaactttttatttgaggaaaatgatgttttataatcgccagcccctgttcacactcctgtcttctggtgttgtattcagaggtaaaaagagaatgttttacattactgtcaaacaaaatcagagcataatctttgaaatcggcattgtgatattcaaaatcaagggtattacaatccagttttatgaccttattttcaagaccatgaacacttgaaaactgatccataataccacaattgattcctacccagtgttctgccttttgccctaataaagcaatgtcggcttttttgatttttaaatcgaaaagtgatgcaattccgaaaatcattccacattctaaagcagcagaagaggataaaccggaacctaccggaatgttgctgctaaagacacagttgaaaccttcaaacacaaaaccgttgtcctgtaattgtttgattacgccacgaatataattggtccagacctcttcgcttaaaagaatttctgcagttaaatcaatttcaaaggcctcgttcaaatcgatggctattattttagagctgttggtattgttcttttcaaaagcaaaacagataatcttgtcaatagccgccggtaaaacatagccgtcgttgtagtcaatatgttctcctataatattgatccttccgggagagagcaccacttttttcggaaccgatccaaaagacttttcaaaaaaagcagttgtgttttgtattaaaatatcattcattaggtagtggttgaaagaaatagcttttagttcttggttgttttttcagcaaatattagattatgttttcaaatcggtaaagggttttttgatgataggtttccccttttcgtaaaaccgaattcggaaaatgtttatgattaggtgcatccggaaaattttgtgcttcaaaacatattccgctaaatgtatgataattagtgttttcttttccttttatagatccaaaacaatttccgcctacatatatatgtacgctgggctgatctgtaataaccttcatctgcaaattgtttccgacactggataaagtggcggaaaccgtttttccggactcaattacaaacgaattgtcaatagcttccgggcattttttagccgttctgaaatcaaaatcatgatcagagagagcaatgaaattcccggttggaatattctcagtatctgtttccaacattttgtcagaatcaataaagagggtttggtttaacaaatcccgatgatgtccgtcaagattaaaataagtgtgatgcgtaagattcacgaccgtatcttcagttgaggtcgctttatattccagttttaattcgttttcttccgttacagtatacgtcaaatcaacctgtaaagctcccggataattctcctctaaattctcgctcaaaagacttaaagttatcgaaggattatcgcccgaagtaatatgggtaatgttccatgttttttgtccaaagccaatgttcccgccatgtaaagcattaccattgttgttggtattcaattgaaatgtctgatcgtttaaggcaaaaacacccttgtcgattcgtccggcataacgcccaacagtagcgccaaagtaaggagcgcttggtaaatgataagaagccagataagattctaaagtatcgaaacctaaaacaacatcaacaacctcacctgttgcaaccggaattaacaaagaggtcagtgttgcaccgtaattgataatttttgctttcattccgtttttgttgcacaattcacaagaaagaatttcttcgtgatcgggcaataaaccaaatgattccatggcagatgtattaggaaggtgtgatatttgttttatattcatattttttttgccaaaaatgaaaaccaaaaatagaaacaatatctgtttttacataccagtacctaccagttttttgtatattgcgtcaaaatctattttgtatgaatataatttctatccaaagtaatattggtttgccaaaatacaggcagattattctctctgtagagaaagcaattgaggaagaaaaactggtaaaaggcgatcggcttccgtctgtcaataaagtttgcctggcattttcgctgtcacgtgatacggtattgttgggatatgacgagcttaaaaaaagaggtattatttatgccattccgggtaaagggtattatgttaaaagcgttgaaatcaatatcaagcaaaagatttttttactttttgatgagttaaacagtttcaaagaagacatctataattcgtttatacagaatattgggaagaacgtccaggttgatattttttttcatcactttaatgttcaggtatttcaaaaactgattaccgacagtaatggaaattacaccaaatacattatcatgcctaccaatttaaccgatgtggcagaggcgataaaaaacctaccagtaggggaggttatcatattggatcagaccaatccggatttgaaattgtatccggcagtttatcaaaatcacgaaaaagatatttttgaaggtttggttaaaggaaaatcacgaatggataagtacaaaaagcttattttgatttttccgggatttagagaaccattgggaatgaaaaccggttttattgctttttgtacaaagtatgattttaagtttgatgtcatcacagaatttacaaacggagaaatcaatgcaggtgatttgtacattatacctaacgaccgtgatctggttcgcgttattgaaaatgcccaatcgcaaagtcttaaactcggaacggatttcggaattatttcttataacgaaactcctttgaaaaagattgtcgctaacggcattgccaccatttcgaccgattttgaaatgatgggagaaattttagccgatatggtacttcatggacacaagcagcagatagaaaataaatcgtctcttttgattcgaaactcgttataattattccgtctgcgcttccggatttaagaaactacagacgaattacgttacaagtttaaaacaaaattgttgcgtagtttttcctcgtatttttctttattgaaagtgtagagatacgatccttttcgggaagactgcatgtctttttcgtccagtttgttcaggattcccatggtattaatcttagtgataaagtttcttttgtccagttctttgctcaaaatagcttcgtacaactccaataattggcgcatggtgaacttctcaggaagtaattcaaaaccaattggcttgatcgaagttttataacgtaatattctgatggcttgctgcaccatttcgttatgatcaaaaattaaactcggagcatcggccacactaaaccattgtgcatgataattttcaataagctcggcattgtgatcttcaatattaatcaaagcatagtacgaaaccgaaatggttctttctaaagggtcacgatcaatttcgctgtaggcataaagttgttccatatacacatcgtttaatcccgtatacatttttaaaactcttatcgcagcattgtcgagtacttcgtcttgctttaataagcctcccatcaaagaccattttcctttttcaggctcgaaccctcttttgattaagagaattttcaaaccttcgcgatcaaacccaaaaataatacaatctactgctaataaaactttatctgcagagctataactgttaagcatattcaaatttttagtggtaaatatataatcctgttaatttcgtttctcaattttttaaacgttgtgtaaacacttaataaatgtaaccgtttgtaaaagttacattaactgctttgattgagacttctgttacaaaagtaatggttttttaatgctaaaatcattattaaagcggtcattttttaacctttttcacaagtttttttaaataaaatatcattttacatatcaaagcgtcacttttacgcaataaaataagaggataattcttacttgaattaagtattctcaagacaattttttgtcgcaaaatcgattctgaagcgaaacgagttggtgttgtcaattgatcaatttttgaactagcgatacattgacgaaatgaataagcattcctgaaaagaaagacgattctgataggactcggtgagaggaaatgcaatttataaccaagaaaaacatcgcggtattttcttatagctctaagaccaatattggtttaagcccagtaaaatagagaccatatcatgttttttttgcttttttaaaaggcaaattaccagaatattacacaagcagatttaaaaatacagcacaaatttcaattattattaaccttatttagtctaaataagatagttttgcgtcatatttttatttctatggaaaagcaatatctaaacattaacgccaaaaatttcccggagatttatgatttgtattggaatgaattgttttgtttttgcagacatcataccggcgacgaagaagctgcaaaggaaattgtacagcaaattttcatcagtatctgggaaagacgggaacagctacaaatcgaaacttctatcagagcatatctatatggtgctgcaaaactcaaaatagtagaatatcatcgaaaacaagtcactaaaaagaaacacgaaagtactcattttgccgaaatgaataaagtttccaacaatacagaagagcatattttgcataaagatctgcttcgtgaactacagttggccatcagcacacttccggaacgatgccggcaggtatatttaatgagcagggaagacgggatggacaaccgttctattgccgcttctcttgttattacagagaaagccgttgaaggaaatattacaagagcacttcggcacattcgcgatcatttaaaagtttttcgcagtttggtcattttttttactcccctatgtagggttagcgaggacttgtgcaactacatcattatataacaaaaccaagactgtgtttattacatccgatttattagaaaaatatgcgcgaaaggaatgcaacgctgccgaaagggtaacagtggagcaatggttaagtgttatagatttagaacgtgaaattattagctctccacaacgagacgggttaaaagaagagatctggtgcaatattgcttccagaacgattcatgtaaaaccaaaatctcagaacagatttctttatgctgccctaacaactgcggcctgtgtgttatttgcgattgtcagtttacattactacaattcatcaacatttgcttcgcagattttagtgaacaatttaaacggtcaggagattaagaaaataaacattggcagtttatcttttttggttgagccgggcagccagtgcaacatttcaatggattttttgggtgaggcaagcgatgttaagttttgcggagccgtttcggttattagcgattcggcaaaagtgcaggaatttaatattggcaccggaacttcaggttgtacagttgtgtatcaggacaaagtaaaactgcaaaaaggacaaacgtatctcgccatgacagatgcagactatgaggtaataacagcaaccagagatgaaatcgccgagggtttaccaagagtatttagctcgaggctgtcggaacgttttaagttataaggaaatataaccccttgggtaaatggaacaaaatttagttttaacacatagaagcataggtattactactcaaaaaaggcaggtaaagaagaaaagtctttctttcacacagtttactatgtgctttttaactagtgaaacgcctttttttaagtttacaaagactatgtttctatgtgttaaaacaatttcattcaacgggttaaaatacaaataagaagaatataagaaaaccgatataactgaaatagagaagttattggtttagggaacaaattatcagtgatgcaatttaaaagattttttttaacggttattttaatgatcatatgtactgccgtttatgctcagaataatgggaatgtcagttttacaggttatatagtagacgatagcgatctgcctgttgccggtgccgaaattcaattgcaaaatactaccgtcgtagtgaaaagtaatagctccgggaaatttgtttttcaaaatattacatcaggaaaatatcagttagtggtatcgatgacgggttatcaaatccgggaaatggctgttgttgtcggacagaatcagaaagaagaaattgttatagcgttaaaatcgaattcggttgtgttaaattctgttgatttgtttggcaaaacgattgaaaccaaaatcaaagaacagccgtttgccgtttctgttatcagtacaaaaaaactggcagaacgtgatgtcgatttgaatcggttaatggatggagtatccggtattcgcgtacaggaatctggtggaatgggctctgaaaccaattattcgattaatggattatccggtaaagccgtaaagttttttgtagatgggattccgatggaaaacttcggatcatccttcagcatcaacaatttttccatcaatacactcgaaagaatagaaatctataaaggagttactccggtgtcctttggtgccgatgcacttggaggttctgtaaacctggtaacacgcagccgtcttaaaaattatatcgatgtgtcgcaaaccatagggtcatttaatacctatcgtacagcggtttccggaaaatggagaaacgaatccggttttactttgcaaacgaattctttctttaattcttccgataataactatccggtttgggggtcaacggtagaagttgcgggagaaaatggaagacctattcccggttatccaagattcagaagatttaatgatgattacaaatcgtacaccattagaactgatattgggtttaccaatgtcaaatgggcagatgccttgctgttaggttttactttagcagatcaggacagaggaatacagaccggaagaacaatggcttatgtgtatggagacgtacgctataatgagaagtttgttatgccttctctgcgttattctaagaaaggatttttattttcaaacttagatgtagatctgtatgcttctataaacaagttaagaggtacaactactgataccagctcttataaatacaattggacaggaaaacctatcggaacagtagatggagaattgggaggaatcagatcaggtaagtccatttattcttttcaggatcgcacgcagttggccagaattaattttgtatatcacctaaaagagaatcaggaggttaacttaaattatgtgtttaccggtaccagaagaaaaggcagtgatgctattgccgaagctgattggacaattccgcttagacaacctcaggatctgaacaaacatatcgcaggtttatcgtatgagatttcttcatttgaggaccgttggaagaatattttctttacaaagtattttgcttatgaagccaatgccgttgtatttgattacaatggcgggaattctaaggaaactttttatcagaatacaaaagacaatgcatgggcttttggatacacctctaaatggttattaccaaaagactataccataaaattttctgctgaaaatactgcccggttacctgaagccatagagcttctgggcaatggtaatacgattgtaaatgcaccggatttacagcctgaaagaagtttcaatgtgaatgcatcccttcagaaaacaatccgtaatacggttcagaatgtaaatttcggtcttaatgtttttttcagagacaccaaaaatctgatctggttaacagagggagatttgatgggaaccgcccgctatgaaaatttgggaaaaatacgtacgcttggggttgaggttgaagccaattatacccgaaagcaatggcttgaaacatcattcaattttacctatcaggatatcaggaacatgcagcgttttgaaggaaacggtgccccaaatcatgtttatagagaccgattacgaaatacaccttacgtaatggcaaatgcagaggcgagattattcctggatgagatgtttcaaatgaaaccgaaaatttcattttttgttagcacacattatgttcatcagtattacttaggctggccaagtctgggagaagcacgcgagaaaatgtacattccaactcagttcgttcaggatgccggttttggttacacttttggaaacggacgttacagtgccaatttcgcctgccgcaatattttagacaaacaagtttatgacaattacttactgcaaaagccgggaaggtttttcagtttgaaactaagatattttttacaataaccaattaaatttaaaatcaatgaaaatgaaatcgttcttaaagaaaacaacatttatggtttctgctgttactatgtttgcggcagttgtaagctcttgcagttcaaagtcagatgaagtagaagccgaaagtgcacagcattttacaattgccagctggactcaggatttgcaatatatcgcatcggtaccttcattagcagaaggatctttaacttttaaagggaaaggtattgaggctaacggatctcgttatatctggcacaaacagtatgtttatttgatgaaccttccgcagaaaaaattcatccaatacgaaatgggtaaagacggaagcttaaaagaaaaaggggctatacttacagacggagtggttccgaattactttcaatcgctgaatattgtagacgataataccatgttggttttgggaggactggatatcaataatggtactgtgggctgggccagaatcaaactaagtgatttcacgatcgaagcaaaaggaacattggccgtaccatacgacgctgctaaaaaaggagttcagttttctgttggaagagcatttgtagacaacggaaagcttattctgggaggttatttttacgacaacgaatcaaaatcctatacagttgatggcgtaagagctttagtttatgattatcctgcaatgaataacttgaaagtaatcaaaagtactgcaactgaaggtggagtgggttatgactacttacattcattagacaaagacgaagaaggaaaccattactttgtagcgagtgccggtaaattctggacaggtgtaggcggaaaatctggagtggtacgtattaaaaaaggcgcagcagattttgataaagattattttattgatgtaacaacaccattaggaaaacaagcctgtttgatgggaatcaattatgtgggtaacggaattgcaattggtaccgttcaatacgaagagttaatgacttcagtaagagaccgtttaaaaaacgtagggcagttggttagaattgatttgaaaaacaaaacagtttcgttgattaatacacctttaagcccggtttcaatggtacgctcaccattggtatacaaaggaaagtattacaccgcaattagtcctgttgatggtgtagcctcaatttacgaagttgatcctgctacaggagctttcaaaaaaggaactactttagatggtggaggttctgttacggttaatttaatagcgccgcatccaacaaaataatagtaaactcaagtttctaattgagtaagtatggccggaagaaattccggccattttttgtttgggatgagtttgtaaaaaacgtcacatagagataagactaattcgcaaaccatataaaatcttaacttcgcaagaacaaaaatacaatcgtgatgaaacatttattcaaggcagctgtaaaatggacttttaaaccaaaaggagaagatgctgtaaaaagattttacagtaaaagtcatcagattaccatagaagggaaaccgattttaaatgtttcggctgccaaagcatttaaaggagatcctgagttgtataatcccgaagatttattgctgagcagtctcgtttcctgccacatgatgtcctatctgtatgtatgttctcaaaacggaatagaagttttggaatattcagatgatgcagaagcaacactcgaggtttctcccgacggaagtgggcgctttgttgctgttcatctcaacccaaaagtaaaaattgcaaacgccgatcagattgaactggccaatgcacttcataccaaagctaaccaattgtgttttatagccaattcctgcaatttccctgtttcgcatcacggaagctgtgaggtttttaaggtataaattttagtttaattattagcgttccttgcgtaaacctttgcgctctttgcggttaaaatagcacacggattgtactgattcgtttcacgaaagcacggatcagcacggatttttttattattggttaacttctgagaaatccgtttttatcagcgtcttcgcaaagcgaatctgcgtaatccgcgttcctttttgtaatgctaatttggacacagcattttgatattggttaccgataaagtgtttctgcgttccttgcgtaaacctttgcggtctttgcggttaaaatagtacacggattgtacggattcgtttcacgaaagcacggatcagcacggatttttttattattggttaacttctgagagatccgtttttatcagcgtcttcgcaaagcgaatctgcgtaatccgcgttcctcgcgtaaacctttgcggtctttgcggttaaaaaatagcccacggattgtacggattcgtttcacgaaaacacggatcagcacggattttttattattggttaacttctgagaaatccgtttttatcagcgttttcgcaaagcgaatctgcgtaatccgcgttcctttttttagtgttaatttgtattcaacatttcgatactggctttttcgatttcctgatcagtaaaaggatctaaggcttttgccagcattttactggttttaatacaacttatcattttggttcgcagatcgagatcgtctccaatttcggttttaagaatctcttcgaaaatctcggttaaataagcgggctggtctctaaattctccttccatccagagtgtcgatagaaattgggctacagcagttattacgttattttgatctttagggctttgattttcttttggcatggcgtttagtttatgattattaattatacgaaaaaaacgtacttttgtttaagccgcaattaagcgataggtagtatggtatcgaaaaaagtaagattgtaaaccactaagcaaagcttgtgtttcacaatctccagaaattctcaacaattttaaatatctttgaattatgagcacagcaacaaaaccaaaacatatcggcagaaacattagccgaatcagagagcttagaggaatgaaacaggaagccttggcaattgctattggtgtaagccagcaatcggtttctaatatcgaaggaagcgaaacggttgatgaggagaaattgtcgaaaattgctgaggtacttggtgtttctgcggaagctatcaaaaacttttcagatgaggcagttttaaatattattggaaatacttatcacgacagcaatgttgttaatggaagtgcatatagctgtaatttcaacccactagacaaagttgtagaactttacgaacgtttggttctggctgaaaaagagaaagtggagtatttggaaaaattgttgaaggggaagtaattctttttgtaaaaaaatagaaactcaaagaagcgctacagattttgcagcgcttttttaagattttataataattttaaattatttattcttttttttagtctcctttaagatctttttgtcgtcgctgtccaatttacgttgtattttttttacatcttcagccgtaggaagattttcgggaataatccctctctgggtaagcatatttcttacggctttgttattttcaatatgctcgctttctattttgttttggccttttaaatctttactctgtacattcaaacctgtcatttctgccgctagatctttggcttttatactaattgtaggtaaaaaatcagcaactggtctattgtcaggaattcccatttttttcttaagcagtagtgtcgataaacgaaataatgcttgatcacctttagaacgaattaatccaaaacctttattatctacaccacgctcaaataatattcctgaaagctgtttttcagtttgagtaagtttttctcttgctttaattctttcaaattctagcaaacgttgttcaattatctctgctcttcgagtttgaacagcaaaataattttgagcaaatgcaattttttctttacgactatctccgttttgagcaattaaatagcaggcgtaacgggtaagcgctatatcttctattaaatgctgagcaccttttccagcttctatcaccttcctgacttcaggaaagtgatcatttatttcttctcctgcatttgtacaagcgtcttttgcttttctgataactttttcaaagttctcccatttactgtaacctaataatttttgcaattctctcgcactccaacattcaactccttctatgtttgatgcaacttcttcaaattgttgaaaaaggattatgatttcctcacttttcataagtgctgttttatatatttataaaaatgaattcttgtattttcagtaattacattaattacctcatgaataaatttaatttgcacttaaatattgaacagtatatgtttcattaagtatattgttacttattttattttatacttttacagaaaaatatactgtttctggaaagtaaattgcctctaaaaagaaaaaatgactaaattttatgaatcaatgaaaacgttttcgttatggctttagatgaaattgacaagaaaatcttacgacttttacaggaaaatgcgcattatactttaaaagacattgcgaacaagataaacctgtctctgacaccggttcatgatagggtgaaacgtcttgaaaaagagggtgttatagagaagtatgtttctattttaaataagaaaaaactcggtaataatttaacggtgtattgtcaggtgaccctcacgaagcagacttatgatacttcggaaggattcaatcagtcgattctgaatttgccggaagtggtggagtgtaattatgtttccggaaattttgattatatgttgaaagttgtcattcccgatatggaaagctttcatcactttcatcaaaaaaaattagcagttcttcctgaagtttctttgatcaatactgtttttgtaatttcagaggtaaagagtacgacagttttgcccatatagtttacaaaagtgctatggattcattttaatcgagtagaattgaagtgactacaactaaaatacaaaagccatcaagaaaacttgatggcttttgctgtatgaatggttttggtgtatcctagtagtaagtaaaacgtcttactttggcaatgtatttcgccagacgaattacctggtggctatagccgtattcgttatcgtaccaaatgtataatacaatgtttttaccatctttagaaacaattgtagcgttactgtcatagattgaaggagctgaagttcctacaatgtcagatgaaaccaattcgttgttcagtgaatatttgatttgctccaccaattcaccttccaaagcgtatttcttcatgatcttgttgatagccgggatcgaagttgcttttttaacttctaagtttaaaacgaccaatgaaccgtttggaactggaactctgatggcattagaggttaatttcccttctaatgatggcaatgcttttgcaacggcacttcctgcaccagtttcggtaatgaccatgtttaaagctgctgctcttccacgacggtattttttatgcatattatcaaccaaattctggtcgtttgtataggcatggatggtttctaagtgtccttttactactcctaaagtatcttcaacagcttttaatactggtgtgatagcatttgtcgtgcaggatgcagctgagaaaatatcaatttcgtcaggattgtactcgttatggtttactccatgaacgatatttggaactccttttccaggtgcagtcaataaaactttactggctcctttagaagttaagtgtctttttaaagcttcttctgttgtaaaagctccggtattgtcaataactaaggcctcattgattccgtataaagtataatcaatttcttccggtgaatttgctgtaatgatatgaacagtggttccgttgatgattaatgcattgttctttggatcggcagtaacagacccctgaaaatctccatgtattgaatcgtatcttaaaagagaagctcttttctctaatgtcgaagcgtcatttttgtctctggtaacaatcgctctcagtcgcaattgatttcctttaccggttttagacattaattctctcgctaataaacggccaattcttccaaaaccatataaaacaacatcttttggctgaatttcttctgaagattttgcttctttcaatttatcgattacaaaatatcgcgcatcaggatatttttcatcttctaaacgatattcgtaagttagttttcccagatctaattttgcaggtggaagatctaaagataaaataactctcgcgatttccactgaatcaaaaatggtgatcggcttgcctacaaattcacctgcatattgatgcaaattgataatatcgctgacattttgatccagtaattggtttttgaaaagaaccatttcaatggatttgtcataccataaatcgcttatgattttaattaattcgacaccagctcttcttcggtcgacttgtaatgatacctctttttggtacaaagattttttgctcataattgattaaattgaaaaaataaatagacgactatttttaaattttgcgcaaaagtacccatttcaatcgatttcgtaaactgttttatgatttatttttgaaatttatataaaaaataatttttcctaatgggttaaaaatagagctaatgataatgaaaatgggagtttatttgcgaagaaaaacaaaaaagtcatcttatttctaagatgactttttttaggagttttcagttttcggtctcagttttcaactgtaaaaaactgagaactgagactgaaaactgagactgtaaagagggatctaaataataattctgagaatttctcccgatttactgatcatttcaagacgaacactttgtccgtcatttttattgtttaaaagtttagaaacagtttcaatgttggttgcttttacattatcaatacttaagataatattgccttgaagttcattttgatactgcattaagttttcgttagtgatgcttctgatttttacaccataatcaattttgaatttctttttatctgaggcatcgatgttttccagctcgattcctttaaattcagtactaaaaaattcatttttacttaaagttaccggaactgtttttgtttttccatctttaatgtaggtcacttttacaacatcatttggacgtttggtgtttatataaccggacagatctgcataagtggcaatgttctggtcgtcaagtttgatgatgatatcacctttacccaatcctgctttttcggctccggaatttttagaaactttgctaatgtagaagccttgtgtttctgtaattcctaattctttagaagcggtactgtttaactcaccgccttcaacacccaaaatacctctttgtacatttccgaattccataatgtcttcgattatttttcgggcaatattagaaggaacggcaaacgaatatccaacataggaaccggtcatagaggagatcatagtattgataccaatcaactcacctctggtgtttactaatgcaccaccactatttccggggtttacagccgcatctgtctgaatgaatgactgaattccgttagtatctagatttcgggcttttgccgaaacaattccagcagtaaccgtagacgttaaattatacggatttcctactgccaaaacccactctccgatttttacagaatcagaattggcaaaagcagtataaggcaatttttcatcagcattaattttcagtaaagcgatgtccattttagaatcggtacctattaatttagctttgtatgattttttattgtttaaagtaatttcgatttccgtagcatctttaattacgtgattgttggttacaatgtagccgtcttccgaaataataactccggatccggttccaacctgttcctgctgttgttgacctccataaccgtagaaaaattccatcataggattgctgacggttcttcgcgagacattttttacgtgaacaacagtgtgaatggttttgtctgcagctgctgtaaaatcaaccgtttcagcagatagtgcgacgttttttccaaatgagttcggggcaagagtaacaacagaatttcctcttccaaaaaaagaattgctgctttcaaataataatttgtaagcaccaagggtagttgcaccgctaagcagtgaaactaaaaataaggttgaaaatcttttcatattacagtttatattattggttattttaacgtaaaaatacttcaaaaaattatctgagaaaatggtttaacgctctttaacaatgattaacatttcattaattatttgttcgtacttttgtgtcagttaatgtaaaaaaaatgcaaatagaattttataaatatcagggcaccgggaacgattttgttatgattgacaaccgttctgagttctttccaaaagagaatattaaattgattgaacgactgtgcgacagacgtttcgggataggcgccgacggacttatcttactcgaaaatgatactgaaacggacttcagaatggtctattataattcagacggaaaccaaagttcgatgtgcggaaatggcggtcgttgtctggtagcttttgccaatcagttgggggttattgacgacaaaactacctttattgcaactgatggattacatcatgcttcggtcggagaggatgctattatttccttgcagatgattgatgtggatgaagtaaaaaaatacgattcttatacttttttaaatacaggctcaccacatcatgtacagcttgtagaggatttagaacattataatgtgaaagaaaatggtgcagcaattcgttatggcgaattatatggtgaaaaagggagtaacgttaattttgtaaaaaaagtagacgatagtactttttcattgcgtacttatgaaagaggtgttgaagatgaaactttggcttgcggaaccggagcaacggcagtggcaattgcaatgaatgctattggtttgacagataaaacgtcaattgatctgaatgttgaaggcggaaaattggtggtttcttttgataagtcagacgaacattttaccaatgtttttttaaccggaccagccaaatttgttttcaaaggaacgatcgaaatttaattagtctaaaacgatccaaaatcagcaatctacaatctacaatcaaatgataacactcaaaggggactcgatttatctgcgtgcattagaacccaatgatctggagtttgtgtatgccatggagaatgatgagagcatttgggaagtcagtaacacccaaacgccctatagcaggtttttgatccgccagtatctcgaaaatgcacagcaggatatttatgaggccaagcaattgcgtttagcgatctgtcaggatcaggactttccggcgattggattgattgatttgttcgaatttgatccaaaaaataacagagcaggcattggcattgtcattcaaaaagacgaaaacagaaatcaaaaagttggatctgaggcattagggcttttaattaagtatgcatttcaccatttaaacttgcatcaattatatgcaaatattgctgtgggaaatgcaccaagtgtagctctttttactaaatttggctttgagaaaataggaattaagaaagattggattttgctccacaaccactatcaggacgaagcaatgtttcagttaattaacaaacaaatttaaatttaagactttgagcataaaaaaaatcatcacgttaactgctgttgccgtaatttcagttttaatggtttacggatttattttaattagtaaaatcttcagtgccaataccaaattcgaggataaagaattgtacgtgtatgttccaactggagcaaattataccgatgtgaagaaaatattggagccctatatcaagaattttgaagattttgaaatggtggctgacaaaagaagttatcctgaaaatgtaaaatcaggtcgttttttgcttaaaaaagacatgaacaatatggatttggttcgcgctatgcgttctaatgttccggtaaaattagcttttaataatcaggagagattggaaaattttgcaggaagagtaggctctgagatcgaagccgacagtttatctttaataaaagcttttaaagatccggaatttttggcagcaaacggtttcaacgaagacaatgtcttcgctatgtttattccgaatacttatgaaatctattggaatacttcagcagagaagtttcgtgataaaatgatcaaagaatatcacaatttttggactgctgagagaatcgaaaaggcaaaaaagcaaggattaactccggttcaggttactattttagcttccatcgttcataaagaatccgtaaagaaagatgaaagacctcgtattgcaggtgtttatttgaaccgtctacgtttagaaatgccattacaggctgatccaacggtaatttacgctttaaaacttagagacaataatttcgatcaggtaattaaaagagttttttacaacgacttgattatgaaatcgccttacaatacttacgtgaatatcggccttcccccaggaccaattgcaatgcctgatattacagcccttgatgctgttttaaacccggagaaaaacgattatatttatttttgtgcgagcgtggaacgtttcggataccatgaattcgctgctactttggcagaacacaatgtaaatgcaaaaaaatattcagactggattgctagtcagggcgtaacaagatagttttgaattttaaaagcatattttttttatcggttttagggttttggagtgttttttctgtaaacgctcaaagcagggttgaaagttttttaacacctgcggatactttaaataaaaaaagacaaaatacagtcataattaccgaagctactctggcttcggtaactttactgggtttgaatcagctttggtatgctgattatcctcgttctaatttccactttataaatgataataacgaatggcttcagatggataaggtggggcatatgtattcggcctatcatttaggaaggttgggtgctgaaatgatgaaatggagtggtgctgatcaaaaaaaacaattaatttacggtgcaggttttggctttgcctttctgacggctgttgaagtattggatggattttcatcagaatggggggcttcttcaggagatgttattgctaatgctaccggtactgctttatacgtttctcaggaattactttggaaagaacagcgtattgttccaaaattctcttttcatactacgcaatatgcgaatttaagacctaaagtattgggaagttcgttaaatgaacagcttttgaaagattataatgggcaaacctattggctttctgtaaatcttcattctttcgcgaaagagagtaaaattccaaagtggttaaatgtagcttttggatatggagctgacggaatgttaaccggaaatttacaaaatgataatcgtgatttcacgcaaaacccaaaaagatttcgtcagatttatcttagttttgacgtaaatttgacgaaaattgaaacaaaatcacattttttaaagactattttttcgatttttaacacgataaaaattccggcgccaactctcgaatactccgccaataaagggcttaaagcgcatgccttctatttttagaaaacattaacttgttgattatcagtataatttgttttttattacctttgcaccgtagaaatttcaaaaaggtgacagcgttttgaagaaaaacaatttatgataaagaagtggtatttttatgcgagtttgatcgttattattacatttttgactttgggttttaaaccctttaatctggaaaccaaaccttggtttctaatagaaaaaacagatggatctgaatacgtatttccatcacaggaagaggatgattatcctatcttacacaaattaaacaccccatttaccggaaaacgccttattggattcaaagaagctgtagcttttaaagaatctcaagggaaatatcgtttggtaaattcgttaggttatatggggaaatatcaatttgggactcaggcactgagagctattggtgttcaaaacaacaaagcctttttaaaagaccctgccttacaggaaaaagcatttctggtgttattgtctaaaaacaaatggattttacgcaatgagatcgaaaagtatgaagggaaaattattaacggaattgaaattacagagtctggtattttagctgccgctcatcttggtggtgcaggttcagttaaaaacttttttaagaacaaaggaggccaacactttagagatgcctacggaacttctttaaaaagttaccttaaagcctttggaggttatgatttatcttttattgaagcagatagtaatgctacaatacaccattaataaagtgtaaactttataaagaaaacctgctgtaaaaagcaggtttttttttatggctgtttttaattagtaaaggttattgagattttaagatgtgaattgccccttgtgtgtcatttcgacgaaggagaaatcacaaacatagctcgataaagattggcagtttcttcgtggaatttctttgtggagtttctttgaggagtttctttgtagaatggcttgtgtgatttgcttcgcctgttcgctatctctcgagtgtccttcgtcgaaatgacacaatgagtcttaaaatggatggtgattttctttatagcatgctagagatcctattgtaaaatttacgtttactataaaaaataatgattaagaaactcaaatactggattttgttctttgattaatgctagttttttatctctattccattttttcaactctttttctcgtgtaatagcctcgtgaatccaagtgaatttttcgtagtatactaaaaattgaatattatattttgatgcaaatgtttttgtaccgttttctatattttgtttgtgctgatgtaatcttagttttaaattgttagtaacaccaatgtaaaaagtcgaacgatgttggttggttataatatagacttaataggtatgaaaggcagattgaggattgaacataatatattattttgtacgaatatactttgttttgttgtttattttagaagtttttttacgctgtgtcatttcgacgaaggagaaatcacataagaagctcgacaaagattggtgatttcttcgtgggttttctttgtaaagtttcttcatagaatggcttgtgtgtcatttcgacgaaggagaaatcacaaacatagctcgataaagattggcagtttctttgcagagtttctttatcgagcttctttgtagaattactgttgtgatttctccttcgtcgaaatgacaattggggtgtgagaataggagcctggcaaagattgaaagtttttttgttgagaaaaatacagaataaaaaaagagaggcaattgcctctctcgtaatgaatttatcttctaatcaattaaaatttctaagattttaatggccgcttcactaatttttgttcctggaccaaagacagctactgctccggcatcaaaaaggaattggtaatcctgagcaggaattactcctcctacaatgaccataatatcttcgcggccgtgttttttaagttcttcaatcacctgagggactaaagttttatgtccggcagcaagtgatgaaacccctaagatgtgaacgtcattttcaaccgcttgtttggcagcttcagccggcgtctggaatagcggacctatgtctacgtcgaaacctacatcggcatagcctgttgcaactacttttgcacctcggtcgtgtccgtcttgtcccattttagcaatcataattctgggacgtcttccttcttgtttggcaaaggcatctgctaattgttttgccttttcgaaattctcgtcattttttattgctgcactatacacaccgctaaaggatttaatttgtgctttgaatctgccgaatacactttcgagggcatcgctaatctctcctaaagtcgctctgtttcgggctgcttcaattgcgattgcgagtaagttgccttctccgctctttgcacaatgaattaatttttcgagtgattgatttactttttcagtatctctggtttctttaattttttgaagttgatccacttgttgcttgcgaaccatttggttgtcaacatccagaatgtgtagtggatcttctttttctaatcggaattgatttacaccaacaattatatcttgtccgctgtctattctggcctgttttcttgctgcagcttcttcaattcttaatttcggaattcccgcttcaatagcttttgtcatcccgcctaattcttccacttcttcgataagtttccaggtgcttttaagaatttcgtcggttaagctttccacataataacttcctccccagggatcaacggttttggtaattttagtttcttcttgtaaaaagatttgagtattacgggcaattcttgccgagaagtcagtaggtaaagcaatagcttcatctaatgcgtttgtgtgcaaggactgtgttcctccaaaagcagctgctgtggcttcgatacaggttctggcgacattattaaacggatcctgttcggttaaactccatccactagtctgacagtgtgtcctcagggctaaagatttgtcgcttttaggattgaattgctgcaccagttttgcccagatcattcgacctgctctcattttggcaatttccataaaatgattcattccgatagcccaaaagaaagacaatcggggagcaaagtcatcaatactcattccggtggaaagaccggttctaatgtattccagaccgtcggctaaagtgtaggccaattcgatatcggcagtggcacctgcttcctgcatgtggtatcctgaaattgaaatagagttgaatttaggcattttttgactcgtaaattcgaaaatatcagcaatgattttcatcgaaggagtcggagggtagatataggtgttacgcaccatgaattctttcagaatatcgttttgaatggttccggataatttgccaatagctacgccctgttcttccgccgcaacgatataaaaagccataataggtaaaacggctccgttcatagtcattgaaacagacatttcatcaagcggaatctgatcgaatagtattttcatgtcttcgacagaatcgatggctactccggcttttccaacatcaccaactactctttcatgatcggaatcgtaaccacgatgggtaggtaaatcgaaggcaatcgaaagacctttttgtccggcagccaaatttcttctgtaaaaagcattactctcttcagcggtcgaaaatcctgcatattgacgaatcgtccacggacgtcttacatacatggtagcgtaaggcccgcgcaagttgggtgcaaacccggctccaaaatcaagaaattctaaatcttcaagatccttttcagaatatctctttttgagctcaattccttcggccgtggtgaagttgtgagttccgggttctgagttatgtgtcagttcgtctaacttttcacggttaacatctaacttaatatgtgtaaggtcttttctcaattgtaaaaatgttatttagaataagtttaattcactatctctcgatgtgtgaaaaatagatttaattacgatgctgtttttataaatagaataatgtatcgcgtatggaaacgtttttaaaaataggattcgaatattgtcatatctaatctgaaaagataatgtgttacttttgaggattgagatactttttttaaaagaatcattaaatctgttacctaattttggatgtatatttttataataaaggcaagaagtttttataatctgcctttgcctcttcaataatgactattttatcgatcattttcgatttcttttaaaaaatcatcaatgtcagagacattatcagggttttttaaatagttttcggttctttctctaacctgatcaatttgccattgtggaattttatagtcatcatgctgtaccggtaaaataattacttcaacttcatttgctacaaaatcctccggcagaattacagttacagaatgatttttaacggatagtatttgtctgatcgcttccataattattttgatttatactcaaatatagttatttgaaattaatttcattcaagctccaatcgctcctgctccagtttttcggctaatcttttttctattattggagtaattaatgtttttctcggttttatttttacgaaaggaaacaattctaaatcatgtttcattttgtcttctttgttcggatgtttgttggtacctaacagaatttccttttttgaatcgaataattcctgttcttttgcagcactttcctgaattttcttcttgatcgttccgtcatttaaaagttttaagaatcctccgtttgcttcaatgtctttaaacaacgttaaacttttttcggccagctgcatcgtcagactttcaatgtaataacttccgtctgccggattatcaaccttgtcaaagtaactttcgtgttttaaaaccagtaattgattgcgggcaatacgatcgccaaattcattgtctttatgatacaaagaatcgtaaggcaggttggctacagcatctgcaccgcctaaaatagccgacatgcattctgtggttgtgcgcaacatgttaacattgtaatcgtaaatcgttttatttcgtttggtaggagttactactaaatgacattctaagtcagggttatattcagcagcgattaatttgaaaagcatgcgcaaggcacgaagtttcgcaatttcgaagaaataatttgttcctactgaaacttcaaaaacaattggttttaaagtattcggaaagcggttcaaatattcattggcatgagccaaactataagcaatttgctgcgtgatagtagcgcctgcattttgatacaaacccgagtcgatacttaaaaatgaaatattggttgttgcttttgaaattttttccagaccttcaaaattatttttatctgctgtagaaaaccagtttccttctcttgccaattgtccaatagggtcaatattgcagtaaaaagtggccttcttctgaattgaaatctcgtccaatagctttacgaaatcgattgaaatgaaattcagattaaagtaaacaattctattttctaaaggaagtgtctctagtaatttttgaacatcaatggttttgtcttcaattgtgaaacgcaggctttcagcgcctctttcaattgtattgatggctctctgaattgatttgtcaatgtcataaacaaaaatgttctggcaaattttaaagttggatacctgagtttttaccgttgcggcctttgtaaattcatctgtgtggtaaaatggttttacctgaatgtcttcaggagaattccaaattacagtttggttgtaatcggctccatctaattcaaactgaattttttgtttccattgtttggatgaaatcggactaaaatcgtcgaacagggtagtggccattgtgtattttttcgggttattctttatcttgaatggtatctccttcaaaatgtatgatgtaaatatcttcgctgtcttttttcataaagtacttttcgcgggcatatttttcaatttgttcaggatttttgagctgtttgatctgttcctgatctttttttatttcgtcctgatagtattttttattgtcttgtaattcatgaatctggttgtccagaaaacgatgatcaaaataagaataattatctaagaataacatccatattacaaaaaagagcaacacccaaacgtatttgttgcccaggagtttaaaccattttttgtctctatatgggttttttattttcatttaaccgattgcgttttataatttcgattgatgttttggttgtgatagaagtgatactccttttgtgccattgtcaggcacaaaaggtgaaatggatcttctaagtttgatgcattaaatttacaataaaaattataaaattcgctgattaattacagcccggactacatctatggccacggtattgtatttgtcgtttggaattataatgtcggcgaaagccttagaaggttctataaactgttcgtgcattggctttaaggtgttttgataacgtgttaaaacctcgtcaatatcacgtccgcgttctgaaatgtctctttttaaacgacggattaatctttcgtctgaatcggcatgaacaaaaattttgatgtcaaaaagatcacgtaactccggattggtcagaattaaaattccctcaacaatcattacttttcttgggtgagttgaaactgtatcatcggttctgttgtgctgtatgaaagaatatacaggctggtctatcgtttcacctgcttttaatgctttaaggtgttttaccagtaattcaaaatcgatcgcacgcgggtggtcgaaattgattaatgctctttcgtcaaatgacaaattgttagtctctttataatacgaatcctgagagattacacccacttctgtgtctggtaattcattcatgatttggtgtactactgtcgtttttccacttcctgttcctcctgcaagtccaataatgagcataaaatttgtgttatatatttgttcagcaaaaataataatttaagtggattcctaatggaatccgaactttaaaattgaatttatgcggataagtttaacttaggttttgaaaggattacgagaactatgcaaaaaaaatcccgatagcaatgccatcgggatttggtgcaatcagtatagttttaataaaatattctgaatttagtaagcacttgtaattatttattcttttttgctttaatcatcatttcaagctgatcccaaagttcttccgggattgcttccagtaaattaaattgtccggcaccttttaaccactctccgccatcaattgtaataacgtctccatttacataagctgaaaaatctgaaactaaataagctgccagattggccaattcctgatgatcgcctacacgtttcaatggtacttttttagccatatcgaatttttcggcaagatctcccggtaataatcggtcccaggctccttttgtagggaatggtcccggagcaatcgcgttagaacgaattccgtattttgcccattcaacggccaaactgcgtgtcattgccagtactcccgcttttgcggttgcacttggtactacataggccgaacctgtccaggcataagttgtaacaatatttaaaatcgtagcagaggtttgtttggtgtcaatccagtgttttccaaatgcaagtgtacagttttttgtaccttttaatacaatatcaataacggtatcaaaagcattcgcagataaacgttctgttggtgagatgaaatttccggctgcattgttcaaaagaacatctacttttccaaaagtttttaaaacttcctgaagcatgttttccacttcttcgtaatgacgaacatcacattgaagcggtaaacattttcctccggtttccgtttcaagttcagtggcggtgtttttaagcttttctaaatctcttgaagtaatggctacctgagcccctaattctaaaaagtatttggtcatggcttttcctaaaccgcttcctccacctgtaacaacaatgactttgccttttaaagcgtcatctcttaacattttatctgtatagctcatatgtatttctttttattacaatattaattaaataaataggatgcacgcataataatgttataaaattttaataaactttaaatatcacctaatttttttgcggctgcttccagtgtaaaattgtctttagcaaagcaaaagcggatgagcttttgatctttgtggtcggaatagaaagtagaaatcggaattgcggcgacaccatgttctgtgattaattttttacagaaagtaacatcgtcatcggttgaaatagtagcataagaagccacctgaaaataagttccttcgcaaggttttaattcgaaccggctattttgaagcagtttctggaagtaatctcttttttcctgatagaactttccaagtaaattgacatcaacaatcttcagatattgactgatggcagcttgtgaaatgctgttcacactaaaaaccagaaactgatgtacttttttaatttccttcattaaatgttccggagcaacgctgtagccaattttccatcccgtaatatggaatgattttccaaaagaagaaaccatgatacaacggtttaaaagaaaatctttggtatgtgccgaaatgtgtttttcttcaaaagtaatgtattcgtaaacttcatcagacagaacaaggagattaggatgtttggataataatctctctaagtgagaaaaatcatcctgagtcaaaattttacctgttggattgtgcggattgttgatgataatcatcttcgtttttgaagaacaggctttttctattgtttcccagtttggggtataatcatcgtttaaagcgacacgaacaggttttgcgttgcacaataaaacaggagattcatacgaatcatagctcggatccaggatgatgacttcatcaccggttttaaccaaagccaaaattgtagtgaaaattccctgagtggctcccgctgttaccaggatttcggtttccggtcgaatggttcggccataggatttttgaaccaattgtgctatttgttccatcaatgggggaaatcctgccattggagtatattgatgcacgttttcttttgctaatctcgcaatgatatcggtcaatctttcatcaacagggaaattcgggaatccttgcgaaagatttatggcgttgtattccgatgccattttagacatgaccgtaaaaatacttgtcgttacattgggaagtttactcatgataaagtttgattagggggaaacttgtgagtgatataggggaatcttgtctagcttatggttatcgcgcctgtattcaaggttcttacttctttttctttatgtttaccgggcttccattttgcagcagactttaaaacacgtattgcttcatctccagttttaaagccaagatctcttatgatctttatatcgctaacagaaccgtctttttcgatgataaaagtgaagtagacttttccttttagagttggtttttcaacgggttttataaaatttctgttaaggaaggaagtgaattcagtgacaccgccagggtattcgggttttacctctattccattgagatcataaatagtatcgtcattcgaaattgaacttgctgttgttttttcagattctttattggtttgcgaaaatgtaatttgaacaaagcagatcagaagtagaagaagaaactttttcattatgaatacggtttaatggtttacattttatgaataataaaaattgtagggcgtttgtcaatatctacttttagctttttccaatcagaaacccgcattgttttaataaattctgttggtaaagtaatatctgttgcaatacaaagatgcgttgacggatttaaaatctgtaaaagatcttcgattaatttgttgtttctatacggagtttcaataaaaagctgtgattggtttttgtcttgtgataatctttcgaaatgacgaattgctgattttttttcgtctttatcaataggtaaatagccattgaaagtgaaactttgtccgttcattccggatgccatcatggccaataaaatagaagatggtcccactaaaggtaccacctgaattcctttttcatgtgccagttttacaattacggcaccgggatcagcaacaccgggacaaccggcttcactcattaaaccaatgttttttccttctagtaaaggtttgatgaagtctaaatgttcgcttgtttctgtgcgtttattaagggtaaaaagaatcagttcggattgttttttttccggcgagactgcttttatggatttacgggccgttttttcgttttcaacgatataatgatctataaaatcgatacttcttttgacagtttgaggtaaaacatccatagggtcgctttcgcccattgttgttggaattaagtatagttttcccaggagtttcatagatgtctttttattttgttaggaaaagaagaacttataaatgtttttcgataagtttcttcgagatgatgtcggttacttcgtctaacatttgatatacattttcaaatccgttggtaacaccaaagtaaggatccggaacatctacgttttcatcgggaaataattcgtctaaaatcagacggactttgtttttatgttcttcagtctgagccagttttataacatcgtcataattagaagaatccatcacatagatgtaatcaaaagtattgaagtcagcaggtttgaattgtcttcctttttggtttccaatgtccaggccgttttttttggctactgctatagatcgtttatcaggggagtgtcctacatgccaggatccggttccggctgagtcaacgatgaaattatttttgggtaattttgaagctaaaataccttcagctaaaggggatctgcaaatgtttcccaaacaaaccattaaaatttttactggcatgatgcgcgtttatagcgttagttttttgttgatgtcttcgacaaattttttgaattgtttgtctgtagaaactaaattgtcaactgttttgcaagcgtgtaatacggtagcgtggtcgcgatctccaatttgtgagccaatgtttgccaaagaagcttttgtaaatttctttgcaaaaaacatggccaattgtctcgcctgtaccacgtgcctctttcgggttttagattgaagtgtttcaacatccaactggaaataatcagacacaattttttgaatataatcgatagagatttctctctttacatttttaacaaatttctctacaacacttttggctaactcaatagtaacttcttttttattgaacgaagactgagcaattaaggaaataatagctccctctaattctctaacgttactcttgatgttacgtgccacatattcaataatatcttccggcatttcaacaccatcacgatatagtatgttttttaagatagaaatacgagtctcgtaatccggttggtgcagctcggcagaaagaccccatttgaaacgggataataaacgctgctcgatatcctgcatgtcaacaggtgccttgtcagaagtaaggattacctgttttccgttttgatgtaaataattgaaaatatggaagaatacatcctgagttcctgattttccggataaaaactgaacgtcgtcaataattaaaacatcgattaactgataaaaatgaataaaatcattacgattgttctttttaacagaatcaatatattgctgcgtgaaaatttcggcagaaatgtataaaaccgttttttcagggtatttgtctttcacttctacacctatagcatgtgccaagtgtgtttttcctaatcctactcctccaaagatcaataacggattaaaggaggttcctccaggtttgttggcaactgccatacctgcagaacgggctaaacggtttgaatctccttcaaggaaattatcaaaactgtaatttggatttaactgagattcaatttttaaatttcggattcccggaattacaaacggattcttaagttcaggatttaggtttttaaacggagcatcaacctcttgaggtttcattggaactctgttggaacttggcagctgctcggtaaacggctgtttatttccataagtgttctccattttaattttatagagtaactttgcgttttttcccagttctttggtaagtgcaactttcaataattttacgtaatgctcttcgagccattcgtagaaaaatttacttggtacttgaatgtataacgcgttatcggttagttcaactgacttgattggctcaaaccaagttttgtatgcttgatcttgaatattgtcctttataaaagacaaacagttttcccataccgattgagcagttttagtcatagattcaaataaattttcttattattgataaagattctcctaataaaaaaggagcagttttattccgtatttcgggataacaaatatgtgaacaaatttctgtaaaaaaaaatattttgaactctaattttataaaaaaaagttgtaagtaaactttttaaacttaattttttttaatctgaaaataatgaaaaatcatcaaacgcaagtgcgtgtccgttactctgaaaccgatcaaatgggcgttgtttatcacggaaattatgtgccctattttgagattggacgcgtggaatggcttagaaataaagggatttcatataaaagcatggaagaaagcggtattggattgccaattgtttcgatgcagataaattataaaaaatcggcacgttacgatgagcttcttactattcatacagctttcaaaagtcaatcatctgttaagattgaatttgattgcgcaatctataatgaagcagatgagttattaacaactgctgtgtttattttggtatttatttcgttaaaaacgggtcgtcctacagcgcctccagattatattttagaattatttaaaacgctggtataattgttataatgtgtccccttttaatgtcaaattatataattttaatatcgatttcaaacattaaatcaaaaatgtcgaatattgtttcggcattttttttgcgtgttttggttgttattttgccaatagggagtcccgagtcttcattaatctccatttcctgagccgtaatttccagttttttttcttttataacccgcattacccgattcatatttttgtaatcaaaggagattaaaaagtgaacgtctattgtcttttctataatctcgcaggcttccagtgccatttgtgccgttgttttgtaggcagtgatcaggccgccaacgcctaatttaattcctccgtaaatccgaaccactactactaaaacgttagttactccaaaagattgtatctgtccgtaaattggtgcgcctgcagtattactgggttctccgtcgtcattggcgcggtaggagattttgggagcggttcctaattggtaagcataacaatagtgtacagcatgtggatgctgcttttttaagttctcaataataggttttacctcgtcttcactttcgattggataggcatagccgaagaacttgctgcttttttcttttaaaagcacttcttcagattcaaaagaaatggtctggtacgtatcgttaaattccaaaagtaaatttctaaattatagttaatgttttttagccacgaattgcgcgaattagcacaaaattttcacgcagatttaaaaagatttaagctgatgctcgcagattataattaaaattgaatctgctcgagtttttttaaatctgcttgaaaaaaaatctgtgacgaaaaatattcttaatagttataatatttttttatcaaataagtcaacaacatcttcctgtccaacttgtaaattccagacatgaaatcctagtgctgctgccgaatctgtattttcttttttatcgtctacaaacaaagttctttttggggatagttcgtgtttgttgatgagatattgaaaaacttcagcatttggttttcgcatgccaatttcaaatgaaaaataaactttttcaaagcattgataaaaatcactgtaaaatgaaatgccggttttgttctcgaaagtttcaatgtgtatagagtcggtattactcaatagaaacaagcggtatttttgagacagcagttgtaaaaattccagtcggtatagagggaagtctgctaaaatggcgttccatgcttccagaatttgttcggtagtggcgtttggaagttgttttttaaagcctgccaaaaaatcctcaggtgaaatgtctccggtttcaaacaaaagattcaattgatctaattctgcattccattcttttagtcctaatttctgtaatcctgaaatagttgcctgtttgtccagattgatgaaaatatctccaaagtcaaaaattatagtatcaatcatgatttctaatgtttaataattcgtcgtcaagaatattggtttttgtcccattttcttttggaataagtggtgctttagttccgtttttgaaagaggtttttccgatgaaaatgcgggcttcgtcccaaatattctggtctataaaggattgtaaagtctgagcgcctccttcgataagaacagactgaatctgattttgatacaaagtagctacgatctgaggtacaatgctatgatcaaaatcgattactgtaaaggtagtgttttctgttgaaaggctggtttcggattttgtaaatacgatggtttttacgctatcgtcaaaaacaaaactgtctttcgaaatgcggttattttgatctaaaataaccctcaccggatggtttcctgaccaatctctcgtatttaatttcgggttgtcatctataatggtttgagttcccgctaaaattgcctgttcttcacttctccatttgtgaaccaattgtctggaataggaattggtaatccaaattggttttctctctgtatttttttgtttttcaggagatagaaagccatcctgactttctgcccattttaatagtatatacggtctctgcttttggtgaaaagtaaaaaaacgtttgttaagttcgtagcattctttttctaaaactccaaccgtaacatttgctccggctgcgattagttttttaataccgtttcctgctactttttcattggggtcaacagttccaacaaccacatgtgggatcttatgctctataattaagtcacagcatgggggggtcttcccaaaatggctgcaaggttctaaactaacgtatatcgtcgctttgcttaacagcgatttgacttttacagaacgtacggcattcacctctgcgtgtggttctcccgcttttttatgccaaccttctccgatgatctgattgtcgtaaacaattacgcttccaaccattgggttcggataagtagtcccaaaaccgttttgagccagttctatgcagcgttgtatgtatttttcatgtatattcaccatacaaaagtagttaattttgagattagtcccgatagttttggggtagttaagcaactatcgaaaaagtatttttacttttgtaatgacattacaaggagtgataaaatatggaaaattggactattagaactattaagaaagaagacaatcaggcagttgcatatttaatacgatccgtttttgatgaaatggaaatccctaaagtagggactgcttatgaagatccgtatttagatttaatgtttgaagaatacaataagccgaaatcagtttattatgtggttgaaaaggaaggtgaaattataggctgctgtggcgttgcccctttagaaaatggttctccggagatttgtgagttgcagaaaatgtacttcttgccaaaaagcaggggcttgggaattggaagtgagatgatggagaagtgtctggagcaggcgaaaatttttggttttgaaaaatgttatatagagacaatgcctttcatgcatgccgcgcaaaaattatatgtaaaatcaggttttgaatatttagaagctcctatgggtaatacaggtcacggttcctgccccgtttggatgttgaaaaaattataagaaaatagtgtagtaaatttgcgttacaatacttatcttgtaatacagttgcccttgactgaaaaataatgctcaaatacccaaaatgaaaatcaaacaatatcggactcagttcattaaagatttatcgcctttttacgacgcgtatgaagcggagagttttttttatttaattcttgaagataagcatcaattgcgacaaattgatttggcattgaatcatgaattggctttttcagaaggtgattttctgatttgggattttttagtgctgcaattaaaaaaagaaattccaattcagtatttattaggtaaaactcatttttacggtttagatttcgaagtcaatgaaaatgttctgattccccgccccgaaacagaagaactggtagaatggattataaatgataattcaggagggactaaatcaaaaaaaatcaagattcttgatattggaaccggcagtggctgcattgcaatttctttggcaaaaaaccttcctgatgcagaagtgtatgccattgacgtttctaaaaaagcaatagcaacagctaaaagaaatgcagtccggaataaagttgaagttacttttatgcttcaggatattttagagacagaagaattgaagtacaattttgatgtcattgtttcaaatccgccttatgtgcggaatttagaaaaagaagagattaaaaagaatgtattggactatgagccgcatcttgctctttttgtagacgataacgatgctttgattttttacaaaaaaattgccgaactggccagggaaaatcttttacaaaacggacaattgtatttcgaaatcaatcagtatctggggaaagagatgattgatttattagaaaagatgaatttcaaaaatattgaactgaaaaaagatatttacgataatgatcgtatgattaagggaactgtttgagtttgctgtcgcagtctcggtttacagtctcagttttcagtcataactaattgcaaactgtaactataaactgagactgtaaactgagactgtaaactagaaattattcatatcgtaatgcctcaatcggatccagttgtgatgcttttatagccggatataagcctgaaactatagcaaccataaaactggtagcaaaagcagcaaagatagccacccacggaattacaaaagcaaaattcattgcggctgcaaaggcaaaaccgacaagaattcccaatacaattccaaccaaaccacctatttgaccaattaataaggtttcgataaaaaactgtactgaaatcgttactttggtagctcccagggcttttcgtacgccaatttcacgggttcgttctgtaaccgaaacaatcataatgttcattaaagcaatggatgaccccaggatcgtaatgatactaataatccaggaggcccatcccagatatttggtgattcccagaattcggttaattaaatcgtcacttcttccaattccgaaattgttgtcgcgaacagggcttaatttacgaaccctgcgcatcgtacttgtagcattgtctacagcttcgtccaaaagttctttttttgaaaccatcacactaatggtgtaattgatttttggggtagtaaacaaagatcgtgcgacctgaattggaactaaaacacgtaaatcctgactgtttccgaaggttgagcctttttcttttaaaacaccgattactttaaatcgggctccacgaatagagataattttatcaattgggttaacgtcttttagtaggcctttttcaaaatcagaaccgacaacacaagagtaagtattgttttcaatgtcgaattggttgaaagaacggcctaaagtagtttccagacctgaattagagataaaatgttcgtcgacaccaacaatcgtaatttccggatcggttttttggtctaaatattttacttccgcttttgaggtagcggtaaatgatagagaggtttcggtaaaaggatatttgtacttgtttttgaaggctaccgcctctgggtacgaaataatcggattgacgatttcgcgttcgtttcctcctctgtttttaaggttgttttcgtattgattgatgttaaaggtgttggcacccattgatgcaaaattggtcgaaaccgtattttcaagtgccgtaacgaccgtcaggattcccaccaaagcggtaattccgatagcaataattaaaacagtaagaatcgtacgtagcaattgagttttgatagaaccaaaagcaattcggatattttctttaaataattttagcatcatgatctatttgtcacgaaaatacgttttttgttacaagtttgttttcgaagtggtattatttattttaaagtttttaagggaaagtagtattactccaatacattaaaagtcattgtctttagttaatagttttggtttgatcgcaatgtcttatctttatttgttaaaatggaattctgaaggtttgtgacctttctttatgatgaagatagtatttcttgcttcggggttatttagatacactagattaaagaatccttttttcgttattattgaaattttcagataccgggatgttttaactttttaaaataaaaaaacaagtaataaaaaatcaaaagcttaatccatatgaatgatagtgatctgaagaggctttcacgtcttacagcaatcctgataatattacagactaaaagacttttgacggccagtgaattggctgaaaaatttttaattagtaaaagaacaatttatagagatatcaaagctttggaacaagcaggagttcctattttgacagaagagggaaaaggctatacgttaatggatggttataggattccgcccgtaatgttctccgaaagcgaagccaacgctttgattactgctgagcagttagttctgaaaaataaagatgcttcgtttgtaaaagaatacacagcagccattagcaagataaaatcggtacttcgaaacaatacaaaagacaaagccaatctgctttcaaatcgtattgtttctgggcagaataataacaatgaccggacaagtaataatttgtctgctcttcaattggcattgacaaactttaatcttgttcgtatcaactatttttcaccggataataatcaaacaaccaatcgtacaatagagcctttcgctatgtatacttttgaggagaattggttgttaattgcattttgcagattaaggaaggattacagagcttttcgtttagaccgtattgcaggtttgacggtggaggatgaagtatttgagccgcataaaattacttttgaagaatattttgatcgcaccaggaaaaaatgtcttccacccttgccataacgttgtcgcaggtgtcttttaattttgctgtgaatcaaaataaaaaaaaatgataacaattaaaattcgtagtgtaatgttacttgcagttacacttttatccttcacagctcaatcacaaaaacaatcaaaaacgatggacaatccgactattcagaaattttacgtaattggcatagcaactagaactataaatgaaaaaggaaagtctgccgtagacatagaagcgttatggacaagattttggggtgaggaaattcaagaacaaataccaaataaaatcagtaatgatatttatgctgtttacagggattacgaaacagattttaacggggcgtatacgctaattataggctcccgcgtaagtacattagaaaatgttcccaagggttttgtgggcataacaattgaaaccgatgtttaccaaaaatacctttcaaaaggcaaaatgcccgaagctgtttttaatacgtggcttgaaatatggcaggataaaagtttgaatagggcttacaagtcagactttactattcatggggaaaagtattatgatggaaataatgctgaggtcgaaacatatatttcaatactacattagctatttttaatctttgatggatttttactgaaaatttattttaaaaaataagatatttgcagacttaattaagtcgaaagttggaaagtcttaaagtcggaagtctaaagatccaacaatctcaaaatctagaaataaattaattttacaggtttgtgattttaagtttcaaaagcaatctaaaatctaaaatctaaaatctaaaatcaaagaaatggcttcaaaaccaagcataccacaaggaacaagagatttttcaccagcggaggtgtcaaaacgtcaatatattattcaggttatcaaacataattttgagaaatttggctttcagccgattgaaaccccttcatttgaaaattcagatactttgatggggaagtatggggaagaaggagatcgtttgatttttaaaatattaaattcaggaaattttttctacaataaaagcaaaattgaactgccaaaatctatcgagcagcttcaggctgtttctgctgataaaattactattgcagaaagagttgaattaaattcgtttacaaaacaaatttctgaaaaagcattgcgttatgatttaacagttccatttgcaagatatgtggtgcagcaccagaatgaaattgagtttccgtttaaaaggtatcagattcaaccagtttggagagctgatcgtccgcaaaaagggcgttttagagagtttttccagtgtgatgccgatgtggttggttcaaaatcgttgtggcaggaagtagaactggtgcaattatacgataccgtttttactgcattaggtttagaaggggtaaccattaaaatcaataacagaaaaattttatccggaattgctgaggtgattggtgcttatgataaattaattgattttacggtcgctcttgataaactggataaaatcggtgaagatggtgtgaaaaaagaaatgatcgagaatggtatttctgaagaagcattggtaaaagtgcagcctctttttagttttaccggaacttttgcagataaaatcaatcagctttccgatttattaacagcgtcagaagaaggaatgaaaggtgtggaggagcttaaatttatttgtgacaatgtggcaactttaggattgtcgacagctactttagatttagatgtgactcttgctcgtggattaaactattataccggagccattttcgaagtagcggccccaaaatcagtttcgatgggttctatcggaggtggtggaagatacgacgatttgacgggtatttttggtttgaaaaatatgagtggtgttgggatttctttcggactagatcgtatttatttggttttagaagaactgcagttgtttcctgaaactgtttcggcgacttcaaaagcattgtttattaattacggagatacagaggctttgtatgcatcacaggccattcagaaattacgtcaggaaaatatcaaagtagagctttatccggataacgtaaaagtaggaaagcagtttcagtatgctgataaaagactgattccttttgccgtaattgcaggagatcaggaaatcgcttcaaattcgtattcacttaaaaatctggtaacaggcgagcagattacggtagattttgaaggattgaaaaatgctttgctggcttaggtttttatgctgaaatacaatattttttgcgcagattcaatcgaatttgcgcattttttttgcttaaacgaaatctaaaaaaaataataattcgagaattcgtggcagaagggaggcaagtctttagtgattttttttcacgcagattaagcagattttttgtttttacgtaagcttgttaaggactaattcatgaattcgtggcagaaagaagataagtctggtgtgattttttttcacacagattcggcagattaagcagattttttgtttttacgtaagcttgttaagaactaattcatgaattcgtggcagaaagaagataagtctggtgtggtttttttttacgcagattcggcagattttttgtttttacgtaagcgtgttaagaaataattcatgaattcgtggcagaaagaagataagtctggtgtggttttttttacgcagattcggtaggtttttttgtttttacgtaagcttgttaagagctaattcgagaatttgtggcagaaagaagataagtttgaaatgattttgtttcgttcagctttatttttaaatccgatagtaaatagtctgttcaaagaatgttttttgtaattcgttgcagaagaaaaagttaggtaaagggctgtagcgttgctgattttttattgaattaaaagcagtgaaatagttgccggaagagaaaaaaagcgtttaatttgcgacttcaaaatacgggcgtagttcaagggtagaatagcggtctccaaaaccgttgatgggggttcgaatccctccgcccgtgcaataataatcttgtttcctttgttaaagattattgctttactgacttagtacttttatgtcagttggataagttggagtgctttttgtctctcgtaaattctgtaaatttattttggttgaaaagctgcattagaaataattcgtggcaaacaaaccgtgtactacctataaatcataaaaaaaaaagcttcgtctcataaggcgaagctttttttaatataaggtaaacttgaattaataattatttataaagccgaggctaacccttaaattcaattttgataggtaataatttagttttcaattggatttcaaatatactataatctatatcgtgatagtcttaaaattatactaaattttaaaaggttgtttttgctttttaaatgactcagtcttaagaaagtgacaatttgacattttgaaagatttggcagtacttttgcaatccaaaagaaagaataaaaaatgaagtttaagaatatctttaaaaataaaagtaatatgactacggaaaatacagaattcgatcaggaattagatgatgtaacgttagagaacaacgccaacggtgagcagttaattgttgaagaattaagtgttgaagagcaattggctcaagacttggcaaaagaaaaagataagtttttgagactatttgctgaattcgaaaattacaaaaaaagaacttcaaaagagcgtatcgatttgtttaaaactgcaaatcaagatgttttattggccatgttgccagttttagatgattttgacagagctatagtagagatcaataaatcggaagatgaaactttgacaaaaggagttgaattgattcatgaaaaattaaaaaatactttagtttctaaaggtttagagcaagttgaattaaaagcaggtgatgcttttgatgctgattttgctgaggcaattacccaaattccggctccgtctgagaaattaaaagggaaaattgttgatgttatcgaaaaagggtacaaattaggagacaaaattattcgtttccctaaagttgttatcgggaactaagaaaagcaaatgacatattctgaaagtcaatttttaaagtattggaattcggaattttaaatttggacacaagcgctagcgaactggcgaagcaatttaacctaaattatgaaaaaagatttttacgaaatactaggcatttcaaaaaatgctgacgctgctgaaattaaaaaagcttatagaaaaagtgcattaaaatatcatccggataaaaacccgggcgacaaagaggcagaagaaaactttaaattagcggcagaagcttatgaagtactaagcgatcctaacaaaaaagcaaaatacgatcagtacggacatcaggcatttgatggttctggtggatttggcggtggtcatggtggtatgaatatggatgacattttcagccagtttggtgatatttttggaggtggatttggtggtttcggcggaggcggaggcggtggccctcgtcgtgctaaaggaagcaatcttcgaattaaagttaaattgactttagaagagattgcaaatggtgttgagaaaaaagtaaaagtaaaacgtaaagttcaggctaaaggagttacctataaaacatgttcgacttgtaacggacagggacaggtaatgcgtgtaaccaacaccattttaggaagaatgcaatctgcgtcaacttgtcctgcttgtggcgggtctggtcagattttagataaacgaccatctgaagcagatgctcagggaatgattttagaagacgaaaccgtttcaatcaaaattcctgcgggagtggtagatggtatgcagttaaaagtttccaataaagggaatgatgccccgggaaatagtattcctggtgatttaattgttgctattgaagaattagaacacgagtttctgaaacgtgaaggtgaaaacattcattacgatttatacattagttttccggaagccgttttaggagtttctaaagacatcgaagcgattaatggaaaagttcgtatcaaattagaagaaggaattcaatccggaaaaatcttaagattaaaaggaaaaggtattccaagtatcaatggttacggaaatggagacttgttagttcacgtaaatgtatggacgccaaaaacgttgaacaaagagcaaaaacaattttttgaaaatgcacttaacgacgatcactttattcctagtcctgaaaaatcagaaaaatcattttttgaaaaggtaaaagatatgttttcgtaaatcggactttttctaaaaggaatcaacaataaatttaagaaacccattctatagcaaaccgtagaatgggttttttgtgtgaatagtacaagatttcgatactatttatttacttttacatccataatgccgcaatggtcaaactgacgcagaaaatcttaattatagcatgagcaacttactcgaagtacataaagtcgtaaaacaatacggtgattatgtagcgcttaacgaagtttcattaaatgtaccaaaaggtagtatttatggactactaggtcccaatggagccggaaaaacttccctgatccgaattataaatcaaattactttacctgacggtggtgaagtgattttggatggagaaaaattacagcccaaacacatacaacatattggttatcttcccgaagaaagaggattgtatacttcaatgaaagttggagaacaatgtttgtatctggcgcaaatgaaaggactttctaaagctgaggcaaaattacaattggaatattggttcgatcgtcttgggattcagggctggtggaacaagaaaattcaggaactttctaaaggaatggcgcaaaaaattcagtttgtagtttgcgtgctgcacaagcctaaattgctgatttttgacgagcctttctcaggatttgatcctgtgaatgcaaatataattaaagatgaaatcttagcacttaaagaacagggagctaccattattttctcgacacaccgtatggaaagtgtagaagaactctgtgatcatattgccttaattcataaatcaaataagcttattgaaggaaaagtaagtgatgtaaagcgtcaattccgaaccaatagttttgaagtgggaattttaacggacaatgtagaaggcctgatgtatgacgttacacaaaaattcaccgtgtcgccagcaagttttaaatccttaaatgacgatctgaaactggatattcaaattggaaacgcagcgccaaatgagctattgcatttgctaacgcaacgcggacaggttacccattttgtagaaaaaataccaagcataaacgatatttttattcaaacagtaacgggatagattgttggatttttagatttcaggattcgtagaatgaatcaggagatctaaaaaaaaaaatctaataatctaagaagtctaacaatctaataatctaaataaatgagtataatttcattaattataaaaagagagtttattgcaaaagtgcgcaataagtcttttgttgtcatgacctttttgagtccgttattgtttgtggcaatcgcaggattcattgggtatctgagttcgatgaaagcagagacgaaaagaattgccattcatgacgaaacaggtttgtttgcgcaggattttctaaaacagaataaggatgaagccgagtttaaatatcttaatttgtctgaaattgatacaaaagccctaaaagacagtattactaacgaaagctttgacggtttaattgttattccaaaaaccggtaatttatcagatttagaaagtaaaattgagtttatctcgaataacagccccagtatttcttttatcgaaaaaacacaggatgtaatcgcatcaaaaattaccaaaataaatcttgaaacggcaaaactggacactttggccattcaaaaagcacagtcagatgtgaatattcatttggtaaaagcatccggagaagagagtttaaaaggattgaatgagataaaaatcggaataggaggtgcttttggttatctgattatgatgtttattatcatttacggtaatatggtcatgcgaagtgtgatcgaagaaaaaaccaaccgaatcatcgaaattattatttcgtcggtaaaaccatttcagctgatgattggtaaaattgtgggaacttcacttgcaggattgcttcaatttatgatttgggcaattataggtttgggattaatgtttgcggcatcggctttttttggagtaaatgttggtccaacagccagaatctcaccggaattaatgcagtctgcccagcatgaaatgtcgggaacagctcaaatgtatattcgcgaattatggaatttaccaattgccagtatcctaattggctttgtaatttatttcattggagggtattttttatacagttcgttttacgcagctatcggtgctgcagtggacaaccaaacggactcacagcaatttcttttgccgattattatgccattgattttgagtgtctatgttggtttttttacggttgtaaatgatcctcacggaaccattgctgtggtattttcgatgattccgttaacgtcaccaattgtcatgttaatgcgacttccgtttggagtgccgtggtggcaaattgcgatttcggtatcattattgtttgctacctttttccttgtagtatggttcgccgccaaaatttaccgaatagggattttaatgtatggcaaaaaaccaacctggaaagaattgtataaatggcttaaattttcatgtttaaaggttctaagatactaaggttctgaggtgctaagtttttttagcttcttaatagaaaaaccttagaatcttagtaactcagaaccttagaacctcaaaagaatgagtaaaatactaattatagaagacgaagcatccatcagaagagttttggtaaaaattttatcagaagagaatgatacgtatcaggtagatgaagctgaagatggcgcggcaggtcttgagaaaataaaaagcaacgattacgatttggtattgtgcgatatcaaaatgccaaaattagacggagttgaagttctggaggaagtaaaaaagattaagccggaaatcccgatggttatgatctctggtcatggcgatatggaaaccgcgattcacacgatgcgtttaggagcttttgattatatttcgaagccaccagatttgaatcgattgctgaacactgttcgtaatgctttagataaaaaacaactcgtagtagagaataagattctgaagaaaaaggtcagtaaaaactatgagatggtaggggaaagcgaagcgatcagtcatattaaagtaatgattgataaagtagcccaaaccgaagccagagttttgattacaggcccaaatggaactggaaaagagttggtagcacatcagttacatgaaaaaagcgagcgctccaattttcctttgatagaagtaaactgcgcggctattccaagtgaactgatcgaaagcgaattgtttgggcacgtaaaaggagcctttacatcggcagtgaaagatcgtgccggaaagtttgaagcggccgataagggaactatttttctggatgaaattggagacatgagtctttcggcacaagccaaagtattacgtgcgctacaagaaaatatgatcacaagagtaggggctgaaaaagacatcaaagttgatgtgcgtgtggtagcagcgaccaataaagacctgaaaactgaaattgcagaaggtcgtttccgtgaggatttgtaccatcgtctggcagtaatcttaattaaagtgccgccattgaatgagagacgtgatgatattccggcattgattactcattttaccgagaaaattgcatcagaacaaggcaattcggtaaaagtgttttcgccaaaagccataaaactattgcaggaatacgattggacaggaaatatccgtgaacttcgaaatgtagtggaaagattaatcattttaggaggcagtgaaatctcggaaaccgatgtaaaaatgtttgcaagcaagtaaatgcttcacgcaatacgctttaagcttcaggctttaagcttttataaaaacgaaataaatttttgcttacagcgtaaagcttaaagcttaaagcataaaaaaaatgaaactgaaaaaaataaacgagaagttacaagacgctttaattgagaatggtctaacggaagcaaatgcgttgcagcaggagactttttcgacgattaaaagtggggctgattgtatcatcctttctccggaaaagagcggaaaatcgacaacaattgtattaaatgtcattcaacaattggcagggaaaacggaagaatcgccacgtgctttgattattgttgaagacaaagttaaagtgttggaaatggaagcgctttttgaaaaatacgggaagtatactaatcttgaagtttatggcgtacacgacaaaggcgatatggattatgataaaaattatgtttctacgggagttgatgttttaatcgggacaccaaataaattaagtgatatgtttacgacagcgggctacaatgtaaaccgactgaaaatgtttattctggatgatgccgatccgattctgaaattacgtcatgaaactaaaatcatgcgtatttcaaacagtattgcgaaagtacagcgaatcatttttgctgaagaactgacagagcgtatcgaaatcctggccgacaaaatgttagtggagccttatttgtttgatatggacgaagaaggagaagaggagcttgatgaagacgaagatgatatcgaagaggaagaataattaaacgataaaaaataaatgtcatgggattaatgaaagtgttttcagggagtgaagtgttagcaattgctttgaaagaaagattagaagaagcgggagtagaaacggtaaaaaaagataacatccagtcagctcgtatgggaggatatggcggatctgatttagcagtagaagtgtttattcaggaaactgatttcgccaaagcaaatccggttattgaagagtttagaatgaatattcaatagcggtatctttttgtaagatgtaaaatgtgagatgtgaaaagttttagtgtacagagactgtgcgctgagactgcaaactgaaaaaaaatatgcaatataaaatgttagtgctcgacatggatgataccttgttgacagacgatcataaaatttcggaccttaataaaaaagtactactggaagcacagtcaaaaggcgtttacgtcgttttggcttcgggcagaccgacatcggcgatgactgcttatgctaaggagttagagctggatttgaatgactcgtacataatttcgtttaatggagcgattattagtacggttaaagatgatgttatcttgttcgaacaaaaattaaccgttgagcaaatccatgagctgtatgactacagtgtaaaaaagaatacccatatcattacgtatctggatggagaaattataagcgaaaccgattcggaatatattgatgttgaaaaagaaattaccggattaccacataataaagtagttggttttaaagaagcggttacagaacctgcggtaaaatgtattttactggcggaaccttcttatctaaaagaagtagaagctgacttaaaagcagcaatgcctcatctgagtgttgccatgtcaaaacctttctttctggaagcagcacagaacggaatcgataaagcggccagtttgaaacttttggcagaaaaactaaacattcatcaaagcgaaatcattgcggtaggaaatgccggaaatgacctgaccatgatcgaatatgcaggtttaggggtctgggtcgataacgtaaccccggaattaagagacagagcagatttaatcgtagcttcaaataataatgatggagttgctgaggtggtgcagcgctatattttaaattaatttgtatgaaagaaccaattgaaacagaacgactaattttaagagaattacttctttcggatgccgacggaatgtttgaattggattcgaatccaaatgtgcatcttttcgttggaaaaaagcctgtaacaactattgcggaaagtgttgctcaaatcgaaaatattcagcagcaatacaaggatttcggaacgggccgctgggcagttgtgttaaaagaaacgaatgagtttttaggctggtcaggtataaaatttatcacctatgaaattaatggtcgccaagatttttacgaaataggatatcgtttcatcgagaaacactgggggaaaggctatgctactgaggcgggaaaagcatttgttgattatgcatttaacaagatgaaagtcaaagctctttacgcttatgccgatgaaggaaacgaggtctcaagaaaagcgttggaaaaattaggttttcgctacgtgaattcttttgaatatgaaggagagctggaagtttggtatgaattgaagcattcagacctgtaaagagataaaatgaaatgtgttccaaatctttgtaaactcaaattgcttaagatttgcaaagatttggaaaacagttcttagttttttaatacttaagaaagaggtattaaatattattttttagctactgaaacaaaatatttgtttccgtcacccattgtcaattttacacgttcgtcgcaaagatcgatagcgaagttggcgctttcgtagcaagtacaagttgtatttttgtctttagacatttcagttttacaattgttgtttttaaaagttgacaattgtggagtgtacaagcttactaaatcagtagaagcagttactaacgaaatgatacttgctgaattgttgtttgtaattctgtaaacgattctatccgtgtaatttacttcgtttacggttactttacgaatataagtgtaagccgttgagccttcacccggttcttttacttcaaatttaaatccaaccgcacgaatggcaatatcaaattgagattgagagtttaagctcgcccagtttgtcaatgtgctgatagatggaaatggattagcagccggagcagtttgtgcctgagcgctaaaaagggttaagaacatcaagcagattgtgggtaaaaatgctttcatatggagttttaatttttaatttttgcctactctttatggttttcggcctgcccatttttatgataacaaaacaacaacataacgatgggaaatcaaaattgttatgcgctatttatgattttgatgctttagtttttggttcctattttttgacgaagtgaaattacttctaaaaatatttccagcaaagttaaatgtaagaaaattttaatttaatatcttaaaaaacgcatttaatcgatgttatttgcgtttaatcgatccgtttgtcgttttattcttattgaattgggttgcatttttttttagttcaattttttttcctgacgatttggtttgatttacagttttttgaaacgaattaaaatagtaggttcttgcaaaatattgatatatagtatattattgattttattttaaagaatattgtatgtaaatttgcaaactcttcaaaagagatgtaaatataatatcttactacttaaaacgtagtttattcctatggaaaatagaaaaaaagttgccttttatacgcttggttgcaaactgaatttttcagagacttcaactattgcccgaaattttaacgatgaaggttttgatcgtgttgattttgaggaaatagccgatatctatgttatcaatacctgttcggttacagagaatgctgataagcagtttaagcaggtggtgaaaaaagcaatgaaactgaatgagaaagctttcgtagcagctgtaggttgttatgcccagttgaaaccggaggaattagcagctgttgatggagttgatttggttttgggagctacagaaaaatttaaaattacggattatattcatgacctgagcaagaatgacatgggcgaagtacactcttgtgaaattgctgaggctgatttttatgtgggaagttattctattggagaccgtacccgtgcttttttgaaagttcaggacggctgtgattataaatgtacctattgtaccattccgttagcaagaggaatttcgagaagtgatgctctggaaaatgtattgcaaaatgccaaagaaatctctgctcagaacatcaaagaaattgttttaacgggagttaatattggagactacggaaaaggagagttcgggaataaaaaacacgaacatacttttttggacttagttcaggctctggatgaggttgacgggatcgagcgtttgcgaatctcctctatcgaacctaatttactgaagaatgaaaccattgagtttgtctctaaaagccgaacttttgtaccgcattttcatattccgttacaatccggaagcaatgatattttgaaattgatgaagcgccgttatttgcgtgaagtgtatactgaacgagttcataaaattcgtgaagtaatgccacatgcctgtattggtgtagacgtgattgttggtttccctggtgaaaccgacgagcattttttagaaacctatcatttccttaacgaaatggatatctcttatctgcatgtcttcacgtactccgaaagagacaatacagaagcggcaaatatgccgggaattgttccggcaaatgtaagagcgaaacgcagtaaaatgctacgtggattatccgttaaaaaacgtcgtgctttttatgaaagtcagttaggatctaacagaactgttttgttcgaaggagaaaataaagaaggatatattcatggttttacagagaattacgtaaaagtaaaaacaccatggaatcctgaattggtcaataccctacaggaaataaacctgactaagattgacgaagacggaagtgttcgcctggagtttttgaataagcttactgaggcttaagtaaaaagaaataaaacatacatttagtatgtcatttcgacgtgaggagaaatcacactagaaactcgacaaagattggcgaatttaggaacggaattattggtgtgatttctcctcacgtcgaaatgacaataaacagaaaagtccttttatacaaagggcttttctgtttttaaaataattacttagcattctccggaattagtaatttcaacgaattaatgtaatcggtatcaaattcaattacccttatcttttgtggattaaagcttaattcaccgccaaactgaccttttatgtccaggaaatcgatagtaagttcctcatccgtcaattcgattagttttcccaagtaagctgattttgctgattttttagcaatctggaaaataccgtatttgtttgtgataaaatggatgatcgaattcaaatctcgtatcggaatgatatcttcggcatttgttttcagaccttttaaacggattactttttcggtaaattccagatcctgatctctgtgtatggcttcaatgtttttatttttcaatagtacaaaaccatccagtataaaatctaccggattgtttcgcaataaaatccagtcatccgaatagtcaataagaaatccggtataaagttctttcttatcggtaaattctatggcaattaattgtcttaaatagttttccatcgtttagtttttagaaattacaacatttaaattccaaattccagcttgcagcatttggaagttggaatttttcaaaagattggaatttatttttagggattagtagaccagatactgctgtttttaatgaaaacgcgacgactcagtttcagttgtgcaacaatcagttcggcaatatcttcgggctgcattactttttcagggtttccgtctgtcagatttaaatctttagccatatcggtagctactgtacttggtgttaaagcagtaacccgaatattgtgttttctcatttcctgcatcaaagaatccgttagacccagaacagcaaattttgaagcactgtaagcgctcgtaagggcgtttccgtttaaacctgctgtagatgaaatattaatgatgtcacccgtttgtctttcgatcatatttggaataacggcgcgggtggtataataggttcccataaggttgacctgaatgattctttcccaggcgtttggttctaattccaggaatttcccaaaagcaccaattccggcgttgttgattaaaatatcgatacttttaaattcggctaatgctttttctacagcattatttatagaattaatatcagaaacatcagcagctaaagccaatgattttacacctaagttattaatttcgattgccagctggtcaacatctgcttgcgttctcgaaactaaaattacattaactccctcgttggcaagtgcaagtgcgattgcttttcctattccttttccggctcctgtaattagggcatttttattttttaagtctgtcatgattgtcatattagaaatgcgaaagcatcatttgagtaccacaaaaataaggcttttgcttcctaaaatgatgctttagatgttttcttaatctaagtttaacaactttttctattctttcaaaaccatgtcgatacacattacagctgccagaattaactgcctttgcggactgtcctgtgctacagtttcttcaatttgaagaacataattatcggcactggtgaagagttctttccccattcctgcccattttttacttacctgagccaactgcttgttttcgtgggtaaatttgaaatcccatcctgtccattttccctgaagtgtagcaaccggtttttcgtttttatctaaaatttcaaatctgccgccaaaagaaaagaacttttgtttaaaggttccgatcagtctctctttatcgtcaaaaacttcaacattcgatctgaaaacggcaatacctctttttaccgaaattagtttttcaccagaagcagctgcgatttcaacattaaaaggtgtcattcttttgtaatcggtgaaacgcaacattttagtgaagaatcccagattattttctctacagtttaagatgatctgattgctttccggattataaatgtcatagttgtttgatgctttaaacatgccaacatgctcttttactagaaataaattctgatttaaaatagggttcattaaataatgtgtgaaaatgattagtaataatatgattgatctccttctgaaagggtttcaaaaggagatcaaatgtaaaaataattttgttaataaaccgctgttaaaaatgaaatctgtgttatcaaatttcagttatttttctttgttgtgataattatagcaccatttattcctttatttccgtagactgaagttgcttcagtttcctttaaaactttcatctctttgatagtattcgggctcactttaggaaaatctttaaaattgattataactccatcaagaattaccaaaggtggattgataagagaattttttgatggggcacatagtatgatctgactatcggcatttacaggttttgtatgagatacatctttctcctgtgcatgtgttacgagacagagaaatatagaaaaagctgatgaagcaagttttacatttttcatcataaaatttaatcgaattttgcagcctcaattaaacggataaattctgctttatatccttcggtatcacttgaaagtccctgtttggctaatttcagaatagcatccggagatttatccgatattagtttagaatctcttagtttcagaccgaaccaggccactgaactgctgaatttaaaatcatctgaggctttttccaatgcaaccgatttgttttcgattacctgtacaagttcaatacttttatcaccgtccggttttttataacggaattttatggtagcaagttcattgctgtaatttgttccggcttcttctactttggtatatttcaaagcatcaggctgctgtgccaaataatcgctttttactccagcgggaacaatttcataaagagccgtaacggtatggttgcttccaagttctcccgcatcaatagcatcatttttaaaatcttccggacgcagttttctgttttcataaccgattaaacgataagcctgaacttgtttcggattaaattctatctgaatttttacatctttagcaattgcaaacatggaacctttaaattcttttcctaaaaagcgattagcctcctgaatgttgtcgatataagcataatttccatttcctttatcggctaaagtttccatcttactgtctttgtaattccccattccgtaccccaggcaggtcaggaaaacgcccgtttttcttttgttttcaattagcttttccatgtcggcattagaagtatttccgacattaaaatcaccatcagtagccagaatcactctgttgtttccgtttttgataaagttttctgcagcaattttatacgccagttcaattccggctcctcccgcagtacttcctcctgcatttaatttttcaagagcatcaataatggttttcttttcgtcacctgaggtaggaggtaagaccagtcctgctgcaccggcataaacgacgatagcaactttgtctttcgggcgtaactcatttaccagtatttttaatgattgttttagcaaaggcaatttattcatgtcgcccatcgatcctgaaacatcaattaagaaaactaaattagacgtaggcaaattttcggttggaatgttttttccctgtaaaccaattttaagcactttgtttttggcattccatggagaatcacttagttcagtgttaattgaaaacggattttgatcttttggctgtggataattgtatttaaagaagttaaccatttcttctacacgaacggcatcttttggaaccgcttgtccgttattgataaaacgtctcacattggtatacgaagcattgtcaacatcgatagaaaatgtggaaagaggtgctgtttttggactctcgaaggcattttcgacaaaagtattgtaatcttcctcattaggttctaccggttgcggaacagttatttttttcagtttggcatttaattctttctccgtaaggtttttgtaaatgccgttctttgtagcaacaataacaactccgtttgaggctttgcttccataaagtgaagtagcagctgcatcttttataacttttacttcttccacatcatttggattgatttttgagaattgatcagatttcacaggaacaccatcgattatatacaaaggttcatttttagaagaaatagctgcagtccctcttataattatgttttgattgggtgcaggctgaacataattagatgcgattgataatccggcaactcttccctgaagcgttgaggtaatagtcttagcagccattttcttgtcacgacgactgtaattagagctttcgtagtcggcgtttgaagatccatagcctacgactactacttctttaagcgattcctgatcaatactcagtttaacattaatcacatttttgtcatccacagtttgagtttgagagttgaatccgatatagctgaatatcaaaatgtcgcctttttgagctttgatggaataacgaccatcaaaatcggtttgtgttgtgtttttggtatttttaatcactatagttactcccggaagcggtatactggcgttgtcggtaacggttcctgtaatgattttctcctgtgctgatgctacgaaacatataagcatagatagggctaatgaaagaagttttacgtttttcatggtagtaatttttagatgaataatcgggttgatcgtagtctaggccttaggcttaggaatgattttttgaaattaaatttgagcttttaccgttagttttttgctgcgggttttccttttcgggtagtaatgattacgacaccttttttccctttatcgccatatttagaagtggcttcgaggtcctgaagaacagtgatggtcttgatttcctgtttgtttaaaggggcatacggactggttggattattgccaaataattcgctttcggaatagtatatgccgtcaatgatgtacaatggcgcatccaataccacaagagaatctacattttcgggctgtaaatttggaagctctgcctgcatcattttgtctctttttgtatcgtcattgtgcgacatggcatttccgtttaaaacaattagcggagcactttttttagccatttgtacaggtttttcggcataagccattttggctgattctcttcgcgctgctccggcataaccatagttttgaatggctttatctttggcagcgttgttttctgcctcttcttctttaaaatatccagatgacgcagctaccggaggaattatttgatctgcaacgggagcaggactggcttgtgtaacaatagcattgttggctgcatactgtatttcctgtactgctactttttgctgttgtttgatttgctgatccaggatttttacagcttctgctttaggtattattggtgaatctgaagaaacaattgcctcttttttctctaaaatgggctgtgttgctttttcttcttcgttcactacaactttaggagtcagagcaggaactgttttgtcagactttagaaattgtgctcccaaagaaaggagtaataaaagagaagctgcgaccgcaatttttttccataacgaaatggtttttttgtcttcctttttgtccagtttatcttcaaggcgtgaccagactttttccattcctggaaaatctttagattccgagtggtgtgcggcctctttaaatttatcgaatattttatcttgattgtccatgactattttgctttttggtaatacaatttatttactaattcctttagtttggttttagcggcattcaattgtgatttcgatgtgccctcagaaatgtttagcatagcggctatttctttatgcccgaaaccttcgataacaaaaagattaaaaaccgttttacaaccgtccggaatatgatttagtaaattcagcaaatcttcttcttccaatgcgttgacctcttccgtaaaaggctgtgaaagcaatttgacatcatcaagatacatattgaaattggtgtttttcttgatggttgccaaacaatggttgacggtaatttttcttgcccatgcttcaaaagctaaaagttccttaagttgatccagcttagtaaatatggtatagaaagcgtcagccatagcttcttcaatttcttcttccttcttaaggtatcgcttgcaaacgcgatacagttttggagccatatgctcataaacctgacgctgagcatcacggttcatttttttgcagttggatatgagagtttcgtttatcacaattgttgtctttatactaaagagggcttagaagataaaaaggttgggagagcaatgaaaaaaagttcaaaaaaggcatttatttttttaatttgcatcctgttgaaggacattgcagaacttataaagtaccacaactattcacaaacttgtcattccgaggaacgaggaatcacacgcgctgatcgataaagattggtgacattctgtgtcgggttcctggtgtgatttctcccttcggtcgaaatgacaaaaataaggattatttctgtatgaatttattcgcaattattataacacagatattcagtaagttccgtaaatttctacttaacaggcaaactcaatttataaattttcgtttcgagaacctctgtatcattatcctcgcaaagcaaaaactcgattttatcatttgattttttatagaaagtcagaccttcgaatttattggttgccgttattttttgagtaaaatcgattttcatggttttaaggtctattcttcctatgaagcttcccaaaatttcaccatcatcataagttgatttagtgttttctactgtagaaaggaaatagattttatcttctaccaaaacagcatcggtaaaactggagcgaatcccttttatttttggaagcttataattggttgcaaccagagcaaattcttctcccagacttttagcatgaatggtaaaaatggtgtttttgtttgagattccgttaccgcgattgaacaggtaccagttctcgccatcaaaaatagaaccttccagattaaaatcttccggttttatttcgccaaaactttgcattaatgcgtataaatcaaccagattatttttttgcagtatagttttctttttaagatcgaatgcaatcattttgtttcggttttcggtagaaccggaaccaaaaacataaagcgtatcgttatggttggttaaagactcaaaatcaggtttaagatttttggcgatatttttcgtcggattgtcaattaaagggtgttcgttcaattgctgattctgcatgttgtattcgtatagaaaaccgctgttatctccaacaaggtaaagtgaattgtcagtaaaaaataatccagatgctgatccgattccgatgatttgaaataatatttctaaggtgaatttttccatgaatgttgttttgaaaacttccgtttattttcttgatttataattcttaattaacttcattgtttcttgatttacagctttttgaattgttattaaagaatgcgaaacaacacattctgcaatacttatataaactagattattgtcatcagttaaattttgattgtaccaatctgcttgattagagctgtttgctccacatgttaaatatactggagttccttcattgtaaagtcgagtagcaattttaatggctctttttataattgctttctcaatatcttttgctttttctgtgtatccaattctcgaaacacattggtacatagagcaaaattttacatttttgtttacaggaataacatctctggttcctttaatttggtttaaatctttaaagcattttccaaacacatcaactatgattttttcggagtttgtatagttgtcatcctgagaaaaaacttgatttaaagtaaaaagaaaaagaaataaaaaaatgtttttcattaaagattcaacttttagtttgtacaataaattttatttcaaaaaccaatagctagccctgataacaataaaaaagtattacaaggtacagcagggatatgctttgtaaaaatagtatatttactattacgaaaaaactcatcaacatgaaatcaatagatccgaatgattttaaaatcacagataaaataaaattatcaaagattcctactttgctcgaccttgatgcagacagtgaggaaaaagaagctaaactcgataaagttcaggctaaattgagtaaacagcaagatgccatgtatgctcacaacagatatggcgttttgatttgtctgcagggaatggatacttccggaaaagacagtctgattcgggaagtatttaaagagtttaatccgcgtggagtagtggtacatagttttaaaacgcctacctcggcagagttggaacacgattatttgtggagacattatgtggttttacccgaaaaagggaaatatgcgatttttaatcgtacccattatgaaaatattttggttacccgcgtgcaccctgagtatgtattgaatgaaaatttacccggaattgaaaaggtagaagatattccgaaggatttttggaaagacagaatggagcaaatcaataattttgaaaagcatattacgcaaaatggaacaattgtactgaagttcttcctgcatttgagtaaagaggaacagcgcaaacgtttgttaagaagattggaagaagaaaagcacaactggaaattctcggttgcggatttgaaagaacgtgcacattgggaagagtatcaggattattatgaagaggctataaatgaaacttcgacaaaaaatgctccgtggtatgtaattccggccgatgataaggaaatggcccgttacattgtggctaaaaccatttgggaagaaatgcaaaagcatactgacattaaagagcctgagttaccggagagtataaaggctaatattaaaatatataaagagcaattagaaaacgagtcttaaaataaggctctttttttggcgctaatgttactgcaactttatgagtgttttgtagtactaatttaatgttaacgtttttttgggattttagcattttttcaatgaactattgtttttttgataatatctaaatcattttaagttaaagagcagtgggtttctttgtaaaaaaatagaaaccaatttttaactacatgaaaagaattattttacccctaattatgttaggttcgttgcttacatcttgtaataacgattctaaagacgaagcagaaacaacaagtgttgtactgaaggatcaatctgtaacaccaagtttaataaaagctcagacaggatttgaaagtttgaaaatttactctctttttagttcagatgatgtttttgcagacagtcctaaatttgtttttggaggttctgctgatggttctggtctattgaaaaatacggacggaacttttactttcttagtaaacaacgaagacaattttgcggtttcaagaattactttagataaaacattcaaaccaacaaagggagaatatttattaaactctagtggaggaacctggagattgtgcggagctactatggctacgcaggccgaacacggttttggaccgctttatttaacttgtggagagtccggagaagaatcccgtacacatgctttagatccgtacgctagtgccggaggagcttcggtttctaaagaattggcaggatttggacgtttaagtgccgaaaatgctttaccattgcgctctactgcttacaaaggaaaaacagttgtagtaattggtgatgatgactcaggaacttacggaggccaggtttttatgtatgtatccaacacagttggtgatttaagcggaggatctttgtacatgttaaaaagaaatgacagcaatcaaagagaaaaagacatgactgtggatcaaacgtatcctgtttctttcgtgaaaattgacaaccatacgactttaactggagctcagatcaatgcatctgtaaatactttaaaagcaatcaaatttggtcgtgttgaagatttagattaccgcaaaggaggtaacaatgccgatcgtgaattgtactttaacgttaccggacaagatatcacaggaacaaatgccgatgcttcaagaacaaaatacggtagagtttacagattaaatcttgatgctgccgatccgttaaaaggaactttagaagtggttttggacggtgacaaccgcagtggaaaagctgggaaattccaaaacccggataatatctgtgtaaccagtaactatgtttacgttcaggaagatgcaaacggatacggtgatgaaacgcacgatgcttacatctatcaatataatatcgctacaaaagaattgaaagtggtattggaattagatcaccgtcgtactcaggctgatgctgccaaatacaacgtaggtaaactatcaaaattcggagattgggaatacggtgctatgatcgatgtatcagatcagttgggcattccggatactttcatgttaagcatccagcctcatacctggactggtgaaaaatataaaggagttgacggaggaacaaatcgtccgaacgagcaacaagcaagtcaaatcgtagtgattaaaggtttagcgagataaatttttaaagcattataaaacagtcatccactatctcaatttgaggtagtggtttctgtttttctgaatatttcccttttaatttttaatacacatgaaaaaaatatacggtttgtttttcctgctggtattggtagcctgtcagaaaaaagacaaacatcaggaagtaaatgaattgtttcagtctgatattactttactgattgagaaggttgctaaacttaaatattccgtgcagtcagattctaccgaagtacaaattcagagacaatttctggaagcacatcagagctacaaaaaggtcgaaatgataagcgagtattattcgcctgcagtttccaaagcaataaacggtcctgcaatacctgagtttgaagaaaatgacaaagtgaccgttccacccgaaggatttcaggttattgaagagttggtttttcctaaatatgacaaacagcataaaaaagaattgcttcaggagctgggtatcttgtcggctaatttggctcgtctagaaaaagtttccaaatccaatcaattgacggacgcgcatgtttttgacgccatgcgattggaagtatatcgaattgttactttaggaataaccggattcgattcgcctgtggtattgaattcacttcctgaagctgtggcagctttagaaaccatcgagaaatattacaaagtgtatgtcgaagataagcccgtttcaaattcgaatcaggtgcttgcaatattgaagaaaggacagcactatttaaaaacaaataccaattttaatgcttttgaccgggcatattttatcaaagaaattgccaatccgttaaacaaagggctgtttaaaaccagatcagaattgggtattccgctcatgaaagagcaaagaggattaaaaacaacggcacaaacgttattcgattccggagcatttgatcccgaggcgttttcaggtttccctgattatcaaacaacgccggagaaaattgcgttaggaaaaaagctattcaatgatccggttctgtcgggtaacaactcccgctcctgtgcttcgtgtcatcatgccgataaagcttttaccgatggtttggaaagagccgttacattagatggaaaatcgatgctgcagcgcaacacgccaacattgaatcatattgcttttcagcgcgtattttttgatgattccagagtaagttatctcgaagatcaggccattgctgtgattaaaaatgaaaatgaaatgcacggttctctggagaaatcagctttagtacttcagaagaatccaaattatgtaagagatttcaaaaaagcatttccgaaagggaccatcaatgaatttgagatcaagaatgctttggcttcttatattcggtcattgagtcagtacgattcaaagtttgatgggtatatgcaaaacaaagagaatttcacgccggatgaaaaagcaggttttaatttgtttgcagggaaagccaaatgtgcgacctgccattttattccattaaccaacggaactgttcctcctaatttcgaccgatcggagagtgaaatattaggcgttcccaataaaagcaaaaagctggacggagatttaggaaagtttgttatcacgcaggcggccattcataaacattcgtttaaaacgccaacgatccgaaacattacacttaccgctccctacatgcacaatggagtttacaatactcttgaagaagtgattgacttttataatgaaggaggcggattaggtttaggattcgatgttccgaatcaaactttacccgaagacaagttaaacttatcagagttggagaaaaaacagctcattgccttcatgagaactttgacagataaaaagtacctgaagtaaatagtggggtatatcatctaaacccgactggtttttgaaacctgtcgggtttgttgtttttaggaaaagtcgattaataactccgttagtcaaaacccagctgccgttcatcaaactaattttaatagcgtttcaggtttgtgctcctttgcatcaaattaataaacattattatcatgaacacgtacaaattattagggttgggagttatttttacattaatctcttttcaatcaaatgcacaatctccgcttcctattcatgttggaataaaagcaggatcaaattattccgaacttcccgtttctaaaggttcggattcaaagtatgcagcgggcttttttggcggtgctatggcccgatttgatttcaaacgtttcttcattcaaaatgaaattctctacagtgagaagtcttctaaaattgaaaaaacagcttctttgccttctaaaaatctaaaatggagaagcctcgaaatgccgttggtaattggttacaaaataattgatcaatcgatgctcaacgtaagagtttttgggggaggagtttactcttatgtgctggatgaaaatatttcctcggtgagtcaattgaaaactgcctatgggaaatttaacaaatccaatataggctatcaggttggagcaggaatcgaaatttcgaaatttactctggatgttacgtatcagggagggttaaataacctaagtaaggagtttagttcgaagccaaattcgtttaacattggggttggttattttatattttaaacaggcttttttggtttggccttgtcagcagcaaagaatctttttgggttctttgctgtttgtttgaaaaatatagggttatttttgaacgcgaagtttctcatcaattttttattcttttagaatggttgtaataaataaaaacagacaccgaatatttttagtttttttctggtgcttactcggaataacgatctggtcacagctgatagaggcttacggcgttcgagcggcagcttctcaggctttttttgttttactgtgttcaagtcttttggcacattttcttagcgatattgtattgcctgttgcattacgcaaaagaagaatggcactatttgcagtgcaaagtgtcatggtagttttgatactttcattttgcctggccgttatcgatgccatcttttcaaattcgcatacccgcgcacgattgtatcccgacgaagcaaacatgacgatgattcagtttttatttgcacgattctttggcagtacccctgcagctattttgatttgcggtactgcctgcggacttcggttttatcaggaacataatataatcgaaagaaatcatgctcagctgcaacaggttcatcttgaggcacaaatcaagattcttcaggagcagattaatccgcatcttatgtttaatgtgctcaatcacattcacattttgatgcagagtgacgtaaaactggcttcggatttactgattcggttttcggatattttgaggtatcaattgtacgaatgcaacaaagaatatgtgccgctgcatctcgaagtaaaatacctgaaagatttaattggagtcgaagaaacgagatggggcaatgaattaaaagtaaaatgtaaatggagtattgaggatgcccagcttcagattgcaccattgcttttagtccctttaatagaaaatgcattcaagcacgtttcaaggcttccggggcaaaaaggatatgtgcatttgggatgtaaacaaacggtgaaacagctgcattttaagatcgagaattcctatacggaacaatacaaaaccccttcaaagaatcaagggctcggacttgaaaatgtcaaaaaaagactgacaattcaatatcctgaaaaacaccagttaaacatcattaaaaccgattctgattttacggtaattgtggttttagatttgaagtaaaagattttgccgtttccgatagccaatgtcatgaaagattttaaattgaagattttaaattgaagattaatgattgcagatttttgattgggtattggcaagggtggaatgggatctgttttcctgaattttacctcccggaaatcaaagatcagcaatcattttagctattgggatataatgaagaacagtaaaaaataaagaagaaaaaatctgtaagatctgcgggaaaaaataaaaaagtaaaaaaaacaaaatatgaaaatgaaatgccttgttatcgacgacgaacctattgcaagaaacggaatcgtagattttgtttctaaaatcgattttcttgaagtcgcaggtacctgtgcgtcagcattagaagccacttcgtacattcaggaaaaagaggtcgatttgttgtttctggatattaatatgccgtatctcacggggctggaatttttggaatcgctggacaatccacctttggttatttttacgacagcatattctgaatatgcgcttgaagggtatcgtttgcaggtggtggattatttattaaaacccattacgtttcagcgtttttatcaggctgctttaaaagcaaaacaatggcatcagatgctggatgctccaaagcagcatcaattagatccctatttgtatgtgcgtcaggaagaaggatttcagaagatttcctggcttgatattctctatatcgagggaatgcagaactatgcaaagctccattttaaagataaggttctggtgattcatcaaacgatgatttctttggaagaaacacttcctactgaaattttctttagaattcataaatctttccttgtcaatattacccatattgattccgtttccggtggacgattgttcataaaaggacaagaactacccatttcaagaacacgccgcgaagcattactgaaagaggtagtctataaaaacttattaagccgatgaccctagaattgccattttagggctaccgctccgtaaaatgtagtcgtaaatcttggattggccatgtctttctccttgaaaatatccttaatttttctattagtactggagaaactgcgtaaaagtgtcgatcctgctgtcggttgcagtgtccagtgtttgccaagcttaatttcaggctgtataccggcaataatttgctgataacctaatagtgatgttttgttgttcacttttgtttctgccgtcattccgcttaactcgaccaccgcttttaagtcaaagttttctgagattcgatacccgaattgaagaccttcaggaaacgtgattttaaaatgccacgcacctctggactcccagttgaaataaattcccggaagtaccatcggaacaccaaaactgttggtgagtacaggtcccataccgaatgccatattgggattgaaatgcttgatgaaaaacacaccaccctgaaacaatacatcatctttattgatctcgaccatatccgtgtaaacccccacagaagccattatcattaacgaccaggttggtgagatagaacgtaaatgtttgactccgatttgcgcattcagcatttcattaggaaagccaccctgaaattctaccggaagcgactgaatttcgtaattcttgttttccattttggcataacttccgtttgcaaaaagagaccagagttttggacggtggtattggtccatttccagagaaagaggtatttcaaaagcaatttgtgcccttctgaaattactttcagcactagttttagtactgtccattggacggacatagttggagaacggaacataatcaactttaagttctcctgctatttttgattgtgattgtgcagcaatactagtcaataaaaaaaggaaaagctgcgatagataaaagattgttttgttcatgattggattaattttctgcgaattaccgcgttctaaaccaatcacgaaaaatcatttgactaatggcagttctcttttgaccaatggtaaaggacagaataaaatctgtcttgtttagtattagttacagagaagcactaacaatttatattttaaataatcctcatatttccgaaacataagtaaacaaattacacatgacaataatctaatgtcttaggttaataatactgatagggttgtcctttttcaataacggtccatctattatttacttttttcattacgatgacataatagtttaaattataaatgggattagatttttgaacagcaactccaacggtcaaataatcattatttttataatacattggctccgacaaaggaattaataatgtctcatacttataaatttgctgaccacttttttcttttttgaacataatagtatcgaaaacttcaaaataaatgttttgtagtttaaaatcagctgaattccattttgtgttttttgcaaatccaaacctaccctcatttctatcatcttggtattttcttctcattttctgaaaatacttttccttataaagaggttcgagaattccgccggctctttcctcaataccatttactctgctaaaaggaacattattgagttttcctcctgaaaataatctcaaggcttcgtttggacttattttttctttgactatcgcaattgttttcgttgtgtctctaactattaatgagagataagtattgatagcctcgtatttatctttgtttgcgagtacattacagtaatgcaaatcatcattaatagaacaaaaagtctttttttcatcataaaaaaagttattcaacccagtatttctcacctattttaatcacctgccacctgttatttatttttttcattacaacaacatgatcatcaaaataccccagaggactcgtatctccaatagcaatagcaattaccaaatgctttttatctttataatacattggttctgataaaattattaattgtgcatgatacttataatcaaataattcttttccttttttgtacataatagtatcaaaagcttcaagataaatattttttaacttaaaatctttcgcactccaatttgcattttttgcaagttcatatttaccctcatttgtgtcatcttgatatttctttctcattttctgaaaatcagtttcatcataaaggggctctaaaatccctcctaatctttcctcaataccatttactctgctaaaaggaacatcattaagttttcctcctgaaaacaactttaaagctccatttgaactcattttttccttgactaccacaattgttttcgttgtgtccttaactattaatgagagataagtattgatagcctcgtatttatctttgtttgtttgcgggtacattatagtaacgcaaatcataattaatagaacaaaaagtttttctttcatcacaaaaaaagttattcaacccagtatttctcacctttttgaaccacttcccacttattcttattttttttcattacgatgacataatagttaagattaataagaggggatgtactttgaatagcaatacctataactaaatattttctattcctataatacataggatcagataaagcgatcaataatgttttatatttataaataggtagtgctttttctttttttatcataatgctatcaaaaatttcaaaatagatattcttaagattaaaatcttttgaactccaatttgcgttttttgcaaatccatacttgccatcatttgcatcatcacggtacttatttcgcattttatttacgtcactccatttaaatagaggtttctgaattccgaaatcagggtcttcaacaacattctttttagagtaaacaaaattggcttcggcaccgccggtaaacaattttataaccgtatttggacttattttttcctttactacaactatcgttttggtagtgtcttttattaataatgacatataagtattgataacatcgtatttatctttttcggactgtgcatacgttgtcataaaacttactgccataaataacagaatagaaaatttctttttcataactacttactttttatataatcctcacattttgaaccaatcggatattgtctatctccaccattactttgagtatcagcacctgattgctcggctgcaagtcgatttaaaattcgatttctgtctgttgatccttctggaaaagttttatcaaatactggcgtatcatacaaaccaccccaggctaaatcaaggtattcctgttgaattgaagtcgcagccgtattacctgtctgaaattcctgaagagcagccgcaatggcattgacataggtttctgccatttgtttgtgttgtaaatcaggggacatccaggcacccttgggagctttttgttgtatgtatacctcaaaaagagccggaaatttagttaacggcgcagaacttccctgagcggcgacctgatcctgaagactaaaaaaataagcatgtactacttcgtgaaggatatttccggctatagatagtgaagttcttgtctcgaaattagaactgattagtgtagtataattattttttacaacacctccctcattatctttagtccttattgtttgtgctggtttatcaatgccggctccaacaatattcaacgtataaggactattggctcccaatctcgcaagcattctggcgatatcgacatttttgttggcttttagtttttcgagtactgctttctggcagggcgtcaggtttttatcggttattcttttttcaatttcgttaaccattgctgtggcataataactggcaaaagccactcccatactggcataattggtcggactgccttcgcctctaaagcgatagcccggtttaatatagggaaaaatgatgtcagttattttaggtttaggatatacattgacgttgttcagcggaatcgggtcaggacccggagacttcacttctccaagcaaatttccggatttataaatgaaatcgttcagaacggcccctctcaaatcggtaaccacaacagcaccgctaaattcaccataacgctctatcacctttcctgtttttttattattgaatccctcttcgggaattaaattaaaaagtacagtctgcaattctccattgatcctgatttgtaaaatactagaatctacattgtccaggccagtttctgccttcacaaccgttagtttagcgtcagtatccgttatatcaatctgttctatagattgaaaatctattgtcaggttaaagttagcgtttttttgggtagactgctgttgctgaaaatcttttaaaaaagtaaccgattctgtggcggatacggtcttcaaatggttctcatcagtgtttacagctgcattttccgtttgtacaacttcaccatcatcacaagagcaaaatagcactagtgtaaaaaatacgggcattaaaaatagctttttcataacatctggcttttaaataagaataataccattaatttactcaataattaaatctgatgcatataaaaaagaaagaaaaagcctatataaattatcaggttttactgatcattaaaagagtagccccaaaaaaacaaaatccgacaggcttttaaaacttgtcggatttgattttgtaccgtgttcctaaaaacaccaaacccgatagaatttaacttctaccgggttcataccaaaaacaaaaaaataaattaaacttaatctttataaatcaaaaccataagctaaacgtaaagcaacctgattggttttgaatttattataatcttcataacggacactgatatcaatgtatttgttggcatagccaattcccggtgcccataaaaaagtagtatcgtcatacccgtttgtgacagcaaaaccggcacctacttctcccaaaacataaaactgatcttcccagataaaagctttaaaacctgcttttgccggaatgaatccaagatcttttgcgtcatttttcataaacagatttgtaaaacctgttgttaaggttagcgatgtttttttagataaatcgtactgcagacgaacatctccgccaagtgaccatttatagtcattatccgtcgggataccaccatttaaaccaaagcctaatctaaaaccctgatcataattcttaacggtactgtcctgagcgaaagtggtattggcgtataagaaagcgaaagcagcaaggcataacatttttaaatttctcatgacaatcatttttgaatttctaatagtgtaaaattagtttcagaatcttaacattctgttatataatttttaggatttgttatataatatcggtgtctcttaaaaagcacttaatattagcttatgtttttaatcgtaacaaagaatccaaagcttctgattatctttgccgactaaaaaagaagtgaagtgaattttaagcagtataccaaagagttttcatataatttaaaattagcataccccattatattaggaatggtcggacataccctaataggaattgtcgacaatataatggtaggaaagttaggaagtacagaattggcagccgtttcgttaggaaacagtttgatttttatcgccatgtcgttagggattggtttttcgactgccattacaccaattgtagcagaaggtgacgccgaaaaaaatgatagtaaaattcgttccgcgtttcatcacggattgtttttatgcatcttgttaggactgatactttttggagttattgttttggccaaaccgttaatggagttactagagcagccagccgatgtaattgctcttgcgaaaccgtatctggattgggttgccttttctttgattccattaattgtgtatcaggggtacaaacaatttgccgacggactttcactgaccaaatattccatgtatgcgatgattatggccaatgtgctgcacgttggaatcaactacatgttgatctacggaatctggatttttccaaaaatgggaattatcggagcagcattggggacggtgatttcaagaatatttttagtgatgttcatgcacatcatgctttcaagaagaaacgatttgaaacgtttctttaaaaactttagttttaatcaaatcaaaaaagagacccttaaaaaaataatcagtatcggatttccatcggcaatgcaaatgctttttgaagtggttttgtttactgcgtcgatctggctttgcggaaacattggaaaaaccagtcaggccgccaatcaaattgctttaagtctggcgtcaatgacttttatgtttgctatgggattaagtgtaacttcgatgattagagtaagcaatcaaagaggtttgatggactataaaaacttagtggtggtagcgcgttcgatctttttgctcgcgattatcatcgaaacattctttgcgattctctttgtagcgtttcatgatttcctgcctcatatgtttttgaatatggaaaacggagggcagcttctggataacaacgaggtaatcggtatcgcgtcaaaattacttttaatagcagccgtttttcaaatttctgatggaattcaggtggttgttctgggagcattacgtggattacaggatgtaaaaatcccgatgtacattacatttgtagcctattggatcgttggttttccgatttcctattaccttgctgaatatacagagctaaaagcgcagggagtttggataggacttttggcgggattaacgactgctgcaatatttctttatcttagatttcattacctgactaaaaaattaatcagaaattcagtttcaaatacttaaatttggactgcaaaagaatcagttgcagctaaaaagagattttaaaaccccttaaaaccgctgcaattggtgagccaatacataaaaataataaatcaatacaaatggaattacctaaatttttactcggagacaatactgattttccagatgatattttcatcattcacctggattatccaagattcattatcaatttaaaagatgatgaggtagaattcatggaagaagcagaagatcttgatgaagcagagttaaatgctgaaatggaaggcctaattgttttggcaaacgagttttacgatcgtgaaataaaccgttacgaagagtaaattccgccagttttttacgttaaaataccacacattaatgaaaaaattaagttttttaaaacccatcgtcaattttattgcgattgggttactgattactaccttaagccgattatttttgttttttatttttaaagacagagtaacagaaacaccaaatttctggtacatttttccaatcggacttcgaatggatttgattttactttgctatatgtctttcctgccggcagttttaattacttttctgcctgataaagcatcgaagtttaccaataaatttcttgtaatttatagttttttattgttgtttctgattctgtttgtagagttggcaacgccggattttgtaaaacaatacgacacccgtcctaataagattttcttagattatctgatctatccaaaagaagtagtcggaatgcttcttaaaagttatctgacttcgatcattgtgacttttttaattttgggagtagtcttgtattttgccttcaaaaaaggaaaaaaatacttctacacgagtagttcagactataaatttaaattaatggtttttccgttattggcttttttattgttttttggagcacgttcaagtcttacctcaaaacgtccgatcaatgccagtaatgctgttttctcaacagatcagttgactaatactttagggttgaattctttttataccgttgcttttgcggcgtattccattaaaaacgaaggaaacaccaagatgtatggtaagatggaagaagccgaggccattgcccgtgttaaaaaatacatgatcgccggacctggtgattttacagatgctgaaattccgtttttacatgtacagcaaccggacacacttttgaagaaaccttacaatttagttgtttttctacaggagagtttaggtgcggagtacgttggaattttaggcgggaaacctttaacgcctgaattcgataaactgtcaaaagaaggattattgtttaccaacttgtattgtacaggaacccgaagtgtacgtggaatcgaagcagtagtaaccggatttttaccttcaccttcagaaagtgtcgtgaaattaggaaactcgcagcaaggatttttcaccttagccgatgccttgaaacaaaaagggtacgaaaccagttttatttatggcggaatggcgaatttcgataatatggcttccttttttaacggaaatggatttcaggatattgtagatcaggaggattttgaatcagacggaaataagtatgcttttaaaggaacctgggggtattcagatgaagatctggtaaccaaagccaataattattttaaagcaaaaggaaataaaccattcttttctttaatgttttcgacttccaatcatgaaccttttgaatatcctgcaggacgtatcaaaccttatgatgctaaacctgcaacggtaaataatgccatgaaatatgccgatttctcgattgggaaattttttgaaatggctaaaaaagagccttatttcaaaaacaccatttttatcgtaatcgcagaccataataccagaacctatggtaaaaatttagtgccaatcaataagtttcatattccggctctgatcatgggaccaggagttaaaaaaggaacggtttacagtaaattagcaagtcagattgatattccgccaactttgttgagctatttgggattaccgtttgaaactccgatggtaggaagaaatctaaataaattagatccaaaaacgcagggaagatcaattatgcagttcaatgatatcaatgccttcagagtcgagaatcaggtggtaattatgcagcctaatttgaaacctttacagtttgaaatcaaaaacgacaccactttaattcccgttaaattaaatgaagatttagcaaaagatgctttggcacatgtgataactgcaggtaatttatataaagaaaataaatataaactgagggataagaaaaagtaattttcagtttattgtaaaaaaaaagctgctaagtatggaagtacttagcagcttttttttgttaaaatctaaaaataggggtaacaaagaataaatttaattgatctatactaaaccaaaaggcgtaacccgaaaagccaaagatagagtagggacaattaaattatttattatgaaaagaatacaacaaaaaaaatctgaagtgctaaaagtaatgttagtttttgtgtctgctgctttttttataagctgcaataacgactctgttgaagatcaaaatgctcaattatcaaacactgagcagcaaaatcagcccaatactcaaagaagattacctcactatgaaggcgttattgtgcgagattggggagcacataatgttgactgcagccaaccggaaggtttttgtaattttattttttacatatggggaaactttagctttgtacaaccagcccctgatggaacaccggtgcgtgttacaaatgttaaaggaaattttgttatggaaattcaaaaaagtgctttaaccccagaacataaaaaagtattattacgaaacggagaagtttatgtaatacctgaaggacagactatagatcctgaattagttaaatctttaaaattcaattcaaacattttagttcccggtaaatactctattaaagaaagtgaagaaacttatacacttgttattaatgtgaagtaaatgaaaaaaagttttaagaaattaaaggctgtttttgtattcatttaataagaactgagcggctgcaaaaggtgatatttcatcattttgcaccgcttttttgatttgtagcaattgcccaataatctcaggatgattgtaaaagtttgatttcaaatgttcgtcaatggtttccatcatccagaattggttttgctcttttcgtctttcctgaaagaagccggttgagccagttgtttccgtataatcagaaatggtgttccagatttcagaaatgccctctttggtaatggcgctgcaggtagtgacttttggctgccagttcgatttttttggtggaaacaaatgcaaagccctattgaattccagtttggcctgattggcttttttgatgttatcgccatcagctttgttgattacgatagcatctgccatttccataatgccgcgtttgatgccctgaagttcgtctcctgcacctgaaatttttagtagtaagaaaaagtccaccatgctgtgaacagcagtttcactttgtcctacaccaactgtttctataacaatcgtgtcaaaacctgcggcttcacataaaataatcgattcccttgttttacgagctacaccacccaaagtatctcccgaagcacttggtctgataaaagcattttcgtcttttacaagttcttccattcgggttttatcccctaaaatactgccgtgtgaaatagagctgctgggatcaactgccagaacggctactttttttcccaattgagtcaggtaacttccaaaagtttcaataaaagtactttttccaacaccgggaactccagtgattccaattcggatcgattgattggcatgcggtaaacaaccttttataacctcgtttgcttttgcggtatgctccggattcgtactttcaaccagcgtgatagcacgactcagagccgtgatatttccggttagtataccatcaattaactcctttgaagaaggttgttgtcttctgttttttttaatttgctgaatagcagaaacattggtgatttctgggggagaaattccggctttttcgtgtaaactgcttgatcgtttttttgaagctgacaaagtatactttttggtagtgtaaaagtacagaaaacaaaaacagtttcaaaaaggattttttttagctgcaaaggttcaaaggttcaaagctacataggtacaaaggggcataggtacaaagatacaaagtgataaaacctttgcccctttgcccctatgtgcctttgcgccttaggatttagtaagctgctgtaaaacgaacctgatggtgtcttggagtttcagcttcgtcagcaataactactgcgagatcttctacggatagaatacttctctgatcgtcattaaaaaccggattttctaatcctagacggtattttccagttcgtccggtggtgattccctgatgcatttcgaaagcaggactaaagaaagcccaatccagttctttttcttcttttaaaatattcaaatagtctctagctgccgttgctcctgcatggtattcttttggaaaatcaggtgtgtcaactgcctgtaggcccggagcaacaaacaaacttcccgctcctccgatagtaataaaacgttgtacccccgatttttttaccgcttcctgaatggcttttgacccggcaataaaatcatcatagatatttggattggtccatcccggattgtaagcattgatcacgatatcatttcctttcaaaatttcagacaaagcttctacattaaaaatgtctgcacttttccacgttgcatttgagttgtcttttgggtttctggcaatagccgtaaggtcatgatttctgttagccagttcgtttaagattgcggtacctacaaatccggttgctccaataattgcgattttcataatatataaatttaattagtaataaaaaatgttacagttttgtgtaaaaaaatagttttagaattgattagaaaaatcttccaaggaaactccctctaattgtaaactaactttttgattcatttcagcatacaaagagctcaaattttgattgatcttttttccaaccggacaatccggattaggctgatttttggcataacccagattgatcgtttcaaaagtcatttcaaatatttctttcaatgtaattttcgaaggatcaaccgcaagtcttgtaccgccgtttttaccttctttactttcaacaacatgatgtgcttttaaattggcaatttcttttcgcaccaaaaccggattcagattaatacttcctgcaataaattccgacgacaaaaaatcgttcgggaatttagtgagcaaagttaaaatgtgaatcgttatggcaaacttacctgaaatcatactgtaataaaatatgttacaaatgtatggtgttttttgaaacaaaaaaaagttttaactaaaaattaattttattttgaaactatgctgcaaagaagttcaggttaaagtgacacaaaatgcgagttttagtaagttgtaactgctttattactagattgctttttgatggaagagaggtatacccagctaataaacaaaagttgcagcggtactctgaaccataagtaagaaatgccttttccgctataattggctgtttgtaaattgatactgtgtgcggctgcatagatattggcaggaagtaaaacgataaaaaatacaatcagcagttttgcggtaagcactctcgtttttggaatcaataagcccactgctgccaggagttctataattcccgttgcataaacaattgttgttggccagggcaaaaaagagaccatcatcgccattcccctggtaaatacaaaatgacttacagctgtaaaaaccagcatgacagccatggcaattcgggctgactgaaaaatttcaattttttttgagattagctttatcaaaagcaacgtaaggataaaaacacctagtaacacaattaaagtttccatatctttttttaacaaagttgcgcagtaaagcaattgaaaacaatgaacctgggttaataaatgcgttttctgattctgctcaaagcttgtggagtgatgccaatataagaggcaagatatttttgaggaatcctttgtatgagctgtggctgttctgtaaacagattcagataacgctgctcggcggattcgttcagcagcgaaagttctctttttgtttttttaagaaacaatccttcactggcaaagcgtccaattacattaccaatcttagtttcggcataaatatcctgaagatcttcgtaagatatacgccaaagaacggtttctgcgagggtttcaatcgtgtatgtgacaggtaatcttgtgataaacgaatcataaccactcgtaaattcgccatcgaatacaaaagtaaaagtacggtcgtgatcctcaccgggaatgtaatatcttaccaatcccttttcgacaaaagaaagataattttcgatggtacccgctttcagtattggggttttctttggaaattcttcccggatgagcttagatgaaaaagtattccattcggcatctgaaagtcttgccattcgttcaaaattgtctcttatcgattgcatttgtttttgaaattagatcttaaaagtagcaaaaaaagaattgaagcggtctgatttgtgtgatgcatcccataataaatgtctatttttgtgactactaaatgatatgagcaactttattcaaatatttctatttcttgcactgggtttacttttacaacgcataaagcaatttccaactcacctttataaggttttaaataaggtcgttctttatgtctgtctgcctgcaattacattgtatcatattccgaaaataaaatggagcaatgaattattgttccctatactgtcgggctggattggttttctactggcccttgtattttttcattttctcggaagaagattaggctggtcaaacaaattgattggctgtttgattttaactgcgggactatgcaattcttcttttttaggctaccctataattgaagctctgtttggtaaaaaaggcttagaaactgcaattcttgtagaccagccgggaacgtttgtagtggtttctacacttggagtttttgtagcagctttttattctaaaggaagcgcggattcccttagcattttaaaaaagatcatcttattccctccgtttattacatttttagtggcctgtttgttgaatgttcttcaatacgatttagataccaatattcagtctgttttagtcaaaatagggagccttgtaactcctttggccttactttcggttggattacagcttacttttgaccgaaaaagccagcattggcaatttttgcgcctcggacttttctttcggcttgtagtagttccgttggtcattttggttttatacgtttttattttaaagcagcattctgaagccataaaaataaccattatggaaatggccatggctcccatgattacaggtgcgatcttagcttcgacttatggattgaaaccgagattgagcagtatgatgattggtttcggaatcccgatttcatttgttacccttagcatttggtattggattctgagtttaatttagttttaaatactaattagatagagaatatagaactttaacttttttttagaaaatcggtgttttctttgtgctttttttgactaattttagagaaactaaaaaatatactattatgtcaacattaagattaggagatatcgctccggattttcatgcagaaaccaccgaaggacccgttaaatttcatgaatggttaggtgattcctggggtgttttattttcgcatccttcagattttactccagtttgtactaccgaattgggaacagttgccaattaccttccggagttcaccaaaagaaatacaaaagttatcgcgttaagcgtagatggtttagactcccatttagagtggatcaaggacattaacgaaactcagaatacaaccgttaattttccaatcattgcggacgaggataaaagaattgcgactttatacgatatgctgcatccaaatgcaagtgataaatttacggtgcgctctgtgtttgtagtaggtgccgataaaaaaatcaaacttactttaacctatccggcttcaactggaagaaattttgacgagttactacgtgttattgacagtttacaattaacagccaactatagtgtagccactcccgccaactggaaagacggagaagatgtggtgattacaccggctgttccggatagtgatattcctgcgaaatttccaaaaggatatacaccaataaaaccttatttgcgtattacaccgcagcctaataagtaaggggctgagttttttagtcattggatttaataaagattccgagtttttaagagttttttcttagaggttcggaatctttattttttccggattcaggggtcgaataataattttgggattatgcggtttagagtagacacaaaaagtgattaatcgcccgcttatgaaacaaaagttgccagctattgaattgtttttctcaataaaagatttgtattgtaagttcgctgtatgaatgcttaaacaaggatttctttgtatggctcacgattgaaatctgaattgcgccaaaagatttggatcttatttcagtttgcaagagtcgataataaaagcaactcctttatggtattcaaaaaaatgtaactaaacctcaaaataatatgatttctaaaacaaacttcagaacgatcggttcgctcgtaagtatgctatttcttttcaatagctgtgagaagggagatagttctgttgattctgaatcaaagactcctgatactacaaatcccgagacaaagacacctccattagctgttaccgcaaacctgagtatagaatcctccaatacgtttggaattttaaaagtatcacaaaacgattttaattactggaacagccatactgttaatgaaacagcagccgtagaaaaactaaaaacgctttgtaaaactgaaatttatcaggttttgaaagatgattttgatttcattgtgatcgtattaaataatgcaacaagtactcctcctgccggaatgccttatggtatttatcaaagggtaaaaaatgatgcacagggtatcggacttagtatgtcagacaacacaaaagattatggttctgcgggtaaactacaaggagtttattttctttacctaaacaatatccagggcggacctattttacatgagatgtttcacagatgggccaattatgctgttccccaaaattatgtataccattgggataaagtaaaaggaatacttagcggaatatccaataacattgccgatattgaattgtatcttgcaggagcgatttctgcttcagagattaaagatgccgagagtctggctatttataatgatccccgttttaccaataaaacaagaataccaaacagtactaattcgcagaaaagttttaaatcacttttggtagtcatgaatcctaccactctgacagatgccgaaataaaatcatacaaagatcaaattgcgaatgtcacccgtacacctgcacaaggaatcactacaggctaccagaatttgtataataaaagcagaggattactaacgttaaccatcggaaatttggataaatccaaaaaataaaattgcattatgactaaaaaacaccatacgaattgtaaaggcgatgttactaaaaaacaaaccttattaaggaggtttacgccacttgttttcttacctgttttattttgtttcttttcggtactattttcttgtagtcatgataatctgcaagaaaagaaggatcctacgatagaaaatcctaaacctggtgaagaacctcaaaagccggatactccaagtactccagggaataatgcagggcttaaagaccttataagtaaacagcaatttcaggagttgttcccttatcgttatggagcagagcagagcaataactggatagtgaatccttcaaaagatttttatacctacgatgcgttgatgaaagcagttgatcttatggcagacctaaaggttgttatcgaaagaaaagggtggtttcagaaaataacccgtactaaaaaatcgactaatgaaacaaaagtgattaaagaagatgccgatttcagtgcttcctggaacaataatactgtagtgagacaagaagttgattatgcagattttataagcattggttctttggaagtacgaaaaagagaactagccgcttttcttgctaatatatctcatgaaactacgggtggctggtcaacggcaccgggaggagcctattcatggggtttacactttcgtgaagaggtaggctatgatgaaaatagtaccacaggttacagagatgagaataacgtggcttatcctccggtagtaaagaaatcctaccacggtcgaggccccatacagttgagttggaattataattatgggcagataagtgaatttttatatggagataaaaacgtactgcttaagaatcctgaaaatgtagccaaagatgcggctttggcgttccagactgctatatggttttggatgacaccacaggctcctaaaccttcgtgtcatgcggtaatggttggtcagtggctgcctacccaacaggatattaatgagggacgtaaacccgggtttggagcgacaattaatattatcaatggtgctttagaatgcaataaagcagatagtgataaaacacaatcaagaagaggtttttatcaaagatatttaactgttctcaacaccagtgaccctaattgtgaatgccaatgcgataaaatgcaaccgtttaaataaggtattactataaaaaagctccatacaaaaaaatgtatggagcttttttttcttagcatcttaggaccttagtatctcagcgccttagtgacttttgaccaattcggccattttctttttatctcctacaacccaaagaatatcatttttttctaaaattaagcttgattccggattcagaatcctatttccatttcgctcaattccaaccaccataccattggtttttgtacggaattgaccaatgcttttttgtacaaaatcttcgggagaaacttcaaattgacgtaaaacaatatctgtttcttctacttttgccggagcctcaatttcattttgattgaggtatttattgaattcagtaacctgagcatcggtaccgataacacaaatttcatcaccgggaaacagacgttcgtttttagttggaattggaattgtaatatctcctcgtttgatgtaagcaatattgattcccatcgattcacgaatacgcagttcttctagagttttacccactaaattggattctgtcccaatatcaaaaaaagacatgtgaccgtcccatggcattaaattagcataacgtctgtcgatttttttgttttcgcgatcatttaaatttttaagaaaatggctttcaattttatggtattgttcgtttaattttttagggaatatttgatagaccacaatagcaacaaccaaagcaataaaggcaactaaaggagagaagaagatgtttagtaaaaatccgattaagaacaatccgagactcattctaatcagaatcagcatcaatattgcaccacggtatttacgttcttcccataaagaatccacttcttctactgccactcttcgaagggagagtgcccataagaatggcgcaataattaccagggtgataagagctgccaatgtatttccgaatcttgtttcagcaactaaaggcgcaacaaattttaccgataataaaataattgctgtaataataatagtatgcagaacgatttgaatgatataagcattaagcactttttgccaaacactgactgattttatcgcctgtgcattgacactgtaacgattaatgtttttaacccatcttttgggaagttttcgttccagaaaatcagaaaatggcacggcatatttgaccataaacggcgttgtaaaagtagtgatggccgaaacggcaacaactaccggatataaaaaggagctggttacatttagtgtcattcccaatgtagcaatgataaacgaaaactccccgatttgagataaactcatccctgtttgtacagattgttttaaaggttgtccggccagtaatgcaccaatagtcgaactgacagactgacctatgatggttaccaaagttaaaatagcgacaggcagtgcatgtgtgtatagcattttagggtcgataagcattccaactgatacaaagaaaatagctccaaatagatcttttataggtttaataagatgttcgatgtgctctgcctgagtcgtttcggcaatgatagatcccatgataaaagcacccaaagcaggtgagaaaccaacatttgcggcaaaacttaccatagttaaacaaagggcaagcgaaataatcagcaacatttcgtctgttagtaaatgtttggcttttttaagtaaggttgggataaaaaagattccgcccagaaaccatacggtcaggaagaaaatcagttttagcacagacatcatcagttcacttcctgaaaattgctgacttacagcaatggttgaaagtagcaccatcatcaaaatagcaacaagatcctgcacaattaaagacccaattacaattccggcaaatttttgagcttttacgcctagttcatcaaaggttttcaggataatagttgtcgaagaaatagaaaggataacacctaagaagatactgtccatttgttcccagcccatccagcgcccgaccatataacccatgacgaccatcgttacaatttgggtaatagctgttatggaagcggttcctccaactttcattagctttttaaaactaaattcaagacctaaactaaatagtaaaacgattacaccaatttctgcccaaacttcaacacttttcatttcagtaatggtaggaaagaaatcaaaatgatttccggccaaaaaacccgctattagataacctaaaaccagaggttgtttgattaatctaaataacagaacagcaattcctgcagtcagcaggatgagacctaagtcgctaattagaggttgtaagtggtgggtagatgcggtggcggcgtttaatgcgatcatagagtagtgttttttgttaagaaaatcatccggctttttgtttcagtgttttgctaaaaaagatacggcgtttggaaataacagtttttcatggcaaataaattcactgaactcctttgaaaaacaaaagtggagtgaatcaacaggactaattttttaatacaatttgtaaataaaaaaagctatcgataaagatagctttttttgagaaaatattttaggttttctttaaattcccacataattactaggggtaatggctaataattcggctctgacagcatcagaaacttctaaagtagcaataaaattatgaatggcatttttgtcaattgcttcatttgttctggttaaacctttcaaggcttcatacggatttggataagcctcacgacgaaggattgtttgaattgcttcggctacaacagcccagtttttctctaaatcttcagcaaatttagcttcattcagcaataatttgtttaaaccttttaaagaagcctcaaaagcaataatggtatgtcccattggaactccgatattacgtaaaacggtgctgtctgttaaatcacgctgcaatctcgaaaccggtaattttgcggctaaatgctcaaaaatagcattcgcaattcctaagtttccttctgaattttcgaaatcaatagggtttactttatgcggcatagcagaggagccaatttctcccgctttgattttttgtttgaaataatccatcgaaacatacgtccagatatcacgatctaaatcgatgatgatcgtattgattctttttaaagcatcgaagaatgcagcaaaatggtcataatgttcgatttgagtggtagggaaggaatggtgtaagccaagatccgtttctacaaatttattaccaaactgtttccagtcgatctgtgggtaagctacgtgatgtgcattgtaatttccggttgcaccaccaaatttagcagcaaacggaatattaaataacaaacgcatttgttcttctaaacgctctacaaaaactaaaatttcttttcctaaacgagtaggagaagcaggctgtccgtgtgtgcgtgccaacattggaatagctgcccattctacgcttagttcttttaatttagaaattaaagcaattaacgaaggcatataaacctgctcaaacgcttcttttgttgaaagtggaatcgcagtgttgttgatatcctgagaagttaatccgaagtgaatgaattctttgtattgagataaacccagtttttcgaaagcatctttgataaagtattctacggcttttacatcgtgattggttactttttcagtttctttaatccaaagagcatcttcagtagagaaatttttatagatgtttcttaaactttcaaacagatcaggatttacgtccgaaagctgtggcaaaggtacttcgcacaaagcgatgaaatattcaatttcaaccagtacccggtatttgattaaagcttcctcagagaaaaagggtgctaatgaaagggttttatttctatatcttccgtcaattggagatatagcattcaattcgtttaaagtagtcattgttatgttgtttgttcgaaaggcacaaatataaacagaatttgtggataaaaaaggatagttcttagtgattagtgattagtccttagatgtttgttttattctcgaggctaaggactaatcactaaggacttaaaaactaaaaccagattttaaacgatctcttaaagtggctacaccttttgaggcgacttcggcaattacgtctactttattacgaaggtttgggatgctgattggatttggatcaatatagaaaacaggtgtgacagagggcgtatatgaaattaatcctgccgccggatatacttgtagcgatgttccaataacggcaaaataatcagctgtttcggtaatgtcgatggcttcttcaagagcaggaacgtcttcgccaaaccatacaatatgagggcgaagctgatgtccgtttgggtccagatcaccagtatagaggtcttctgtccagtctaaaattaagttgcgattttgagtgcttcgtacctttagtaattctccatgtaaatgcaggactttggtgcttccggcacgctcgtgcagattgtctacattttgggtgatgatgtgcacatcaaaatcatgctctagttcggctagaatgttatgtcctgaattgggttctacttccttaagctgctggcgtcttttgttgtaaaagtccagaaccaattcctgattttttctccagccttcaggagtggcaacttccatcacatcatgaccttcccataaaccatcactgtcgcgaaaagttttgatcccgctttcagcactaattccggctccggttaaaaccactaatttctttttcattgtagtgtaattaaaggataaaaatagtgatttctccatttagtttcagaatagcagtattaccattacattttttttaatagtttagataaccgataaaagcgtatttatacttattgtttcggtcttacaaattatctagttttagtgagcaataaaagaaaagaaattttaaatgattttaatacaatttacaggattatcgggttcgggtaaaacaacattagctgaaaatgtgcgacagcttttaatagaaaaaaagtataaagtcgagataattgatggcgatgtatatcggaaaaccatctgtaaagacctgggattttctaaagaagaccgctgcgaaaatgtcagacgtctttttaatgttggacgaaattttgttgtatcggacacgatcgttttgatgtcagttataaatccatatgaaaacctgagaaacgaattgcgcaatcatgaatttgtcagaactgtatatttagattgttcgattgataatttaatcgaaagagatcctaagggattgtataaaaaagcattattatcggataatgatcctgataaaataaagaattttaccggtataagcgatatttttgaaactccgttacaaccagatttagtgctgaaaactgatgtagaaagcgttcctgtttcgactcataaactgtatcattttattttaaacagtttacctgatttggcttgatctttaaaatcaggttcccaaattctatttattttacttatttctttgatgataaagcgtttgtaatttttttatatttacaaaccccaaagcataccgtctaatttaattttttaatgcttatgaacccttcttccagtaaacttcctgtttcttttttagcagataaattgcaaaaagaactggcaatatgcgaaaatgatctctggacgccccattttaatactggcgactatagcggcaattggacaagtgtatccttaaggtcacagtccggtttagtaaacgatattacctcttttgctaatcaagagtataaaaacacagcattactggagaaatgtccttattttaaggagatcatggattggtttcagtgcgagaaggaagctgtgcgtttgctcaggttaggaccgcaaagcgaaataaaagaacatacggataacgatacctcttatgaagatgggttttttagaattcacgttccgatcataaccaattctgatgtacttttttatgtggataaaaaactggttcccatgaaaataggggagtgctggtacgcaaattttcagcttccccatagtgtagagaataaaagtgctgaggcacgtattcatcttacgttggattgtgtccgaaatgactggtccgatcaattgtttgctgaaatgggctttgatattcattattcccgagaaaaagagcaatattctgatgaggtaaaacaaatgattattgcagaactttcccgaaacccgtcggcagctggagctcagattattgccgatttgcaatcctaataaataccgaagaatggaaaacacaaatcatcctttactaaattggattccctataaattaatcgaaaaagaaaatgaagtttatctggaatggctgtacctggctgataaaagatatgtcgatcctttttttgatgaaaccatttcgaaatgtaagagtcatgcctataattcaacatcatttaaaattgttagtacggtagaaaatttagtagactggtcaaacgaattggtttcggcagatttaaaatcactcgtatttcatgtttcccgatgtggttctacaatgctgagtcaatcgctggcaacttcgaaggagaatattatgatttcggaagcacctcttatcgatgaaattttaagaagtcataactttggaacagataaaaaaagcgtgcttttacaatcggctttgaaattcttaggtcaaaaaagatttccggaacaaaagaatttaattgtaaaattagatgcctggcatatttttaaagccggatatctgaggtcaatattttccgggctgccttttgctttgctttttaggaatccgggtgaagtcttaaaatcgcatcaaaaaatgatggggatgcacatggttccaaatttattaccgccggaagtttttgggattaccgccagagaaattagcgagatcagtttccagcaatatggagccttgatcttagggaagtattttcagggttttctggatttttatgaaacagatcaaaatgtcgtaaaactcaattataacgatggtatgagaagcgtcatcgaaaagtatatatcctttattaatattgattacagtgccaatgaacttgaaaaaatgtatgaaagactcaacagacactctaaaaatgaaaatgccacttttgaaggcgattcgtttaaagaggaagccttagaaatcgatttgacattggtaaacaatttgcatgaaaaactggagaatatttttgtagaagatgcgtcacattgaaaaaagatctcagtttttctttttgttttattaggcggtgttttttcttacaaaaaaataaatctctttaataaataaagtgtatttttgtggcaaattaagatggaaatgattgatttagattacctcgcttttcttgaaaatatattaacagacaaccgcaaagaacgatttttggatgttctggccaatcgcaccaaacattttacagttgctgtagaagatgtttttcagatgcataatactagtgctgtgatgcgcagttgtgaggttttcggaattcaggaactgaatattattgagcagcgtttcggaaaaagaatcgataaagaaatcgctctgggtgcacaaaaatgggttgacatcaatcgttttgataccgtagagggctgtatgacttctttgcgaaaccaaggatatcaaattattgcgacaactccgcatgaaaacgattgtttaattcaggatttcgatatcacaaaaccaagtgccttatttttcggaacagaaaaagacggattatctcctgaaattatggaaaaagcggatggttttcttaaaattccgatggtaggttttacagaaagtttaaacatttccgtttcggcagccattatcattcaaaacctgaccaaccgattgcgaaattcagatatcaaatggcaattgtcagacgaagaaattctagaaaaacgattgatttgggcgaaaaattcgattaaagatattaggcgtattgaagcacgatattattctgagaaagaaacatcagattagtatttttggagatcttcgcaatgtaaacgaaatactccgattgtattgaataatgataatgaaatgatttaatttttttttcaataaaaaagagttgtcgaaattcgtgttgcaaaacagaatcattttaatgccactccttctgtaaatggtaccggacaacgataggataaaaatagaggttatctttaaactggaatgctttgtcttttagctaatgacaacattattaattcttagctttggatttgcaagatttttaataatggtaaatacggtctgataatttaaaattgtcttaccaaacaaatcctcaaactgtctgtaattttcattgaacatttgttcctaatttaggatagaaaacggtgcactatttctactcgatggctccccccggaaggaactctctgtttcctaataacagatgctctgctgtttctaactctattgtatttttattctatattatgtacagattttaagaaaggattgattttttgtttgccataacgattctaagcctttttctggtgaaaaatgtttgaaaattttataatcaaatcatggattgtgagaattttaaaaaagaaatctcataccataaaacttgtctaaagtctgaaaattggcctgtttgtaatgttttcaaacataattattcagactaaatttataaaactaacaattgtttatttaataatctgtaagagctttcaaaataattgattaagcttatttttttttttaaagaagaacgatctgcttttatcttttttttttcgtgttaaacttttaaggatattgctttatttataagaatattcttatttttgaatttgaaatcttgtaattccgtataaccatgttaaaaataagggtatatcagttgtttagtcccggaatgcctttccgtattggggatatgacttgactgttgggaaaacaagtaaattcacggaatattaattaataacgacagccaaagaaattaatgtacgtgatgaaagtgatggtgtcatcgcgtttgatcaaaaaaacattcatttattttgaaagtatgttgtttagtatattataaaaatgaaannnnnnnnnnggataatatagaaaatctaattgataaaggtgataataagttaaccttaaaggatgtccgaaacgaactgaggatatctaaagagattgtaattgagtctacagaaaacctgactaatgaaagtgataataagttaacctcagcagaggatgttcaaagcgaattaggaatatctaaagaagttatagctgaattgaataacgatattaacaatatgatttcttttgccgtacataatggtataatagttgacccggagattaatagtcttgttcaaaacagtaatattgatagtttgctcaaagcatataatatattgtgcaaaaacatttctcccgtaactcccaaatctatatcgttttgtaaattgatggctagtaagtggaatagtaaaaatatatttactaaaatgcctataacaaagaatttatttattacttcctgttgttttcttattgcttttatttgtacaagtttatcttctgaggttaatatgaattcgttggacgaaggagtattgaacaatgaaggtatatcgggtttgttgaacttattatatttaatttctcttgcaggtttaggggttatgttctatttactgagaagtataaattattctattagaaaaggcaccattacacccgaagattccgcctacttccctatagtaattattttaggattgatttcaggccttattatgtctgagattctttcattccagttttttgatcataaagattccggtctgttgttcaataaaagtttgcttgctattctcggagggtttgcatctgatgttcttttcagtattctgtacagtttgattaacaaaataaagaaaacgtttgaggttgtgcctataaagaaagaatcatgatttgtgaatcttctttcagaaatacagtatcatccaagtaaaccggaagaatattttacacaccaaaactcattgacggagtttacaatgacatagaaagtgagattttactttgagaatgtaataaacttaatatataaacttctagtatgatgagattttttagcccctatatttccatatttggttttggattgcttacctcttgtagtgtgcttcctgattcgacgactattttaacacgagaagttatcaaggagggagtcggtatgcatgatttaaatatagcattaaccaatcaactttttgcagaacggaaattaagattggactcttttattcaggaaaattacatccctgctatcatagaaaattatcagaaaaggattcccgattcaattaactataaaaaggaatttcctaacattgtaatgggtatccttcccgttatttaccaaaagaaagattctttacaaaatgtattaaatatacagcagcaggagattattggccaattaaataacagttttggtaattatactgaggcaacagcttctctgcaagatttaattgattctaatattcgactaaagaatgctaaagaaaatgcttctaattccattttcaaactcattactaaagataaactggatgtgaaaaaaatagaagaaagtattgaaaaagtattgaaaaaataattgaatactgtagttgtaaaatatacttaatatcataaaaatggaatttatgtcagcaatagattggaatgcacttgctgccagcgcggcagctcaaacggataatgagtttaaaaatagtttagcagctttaaccaacttaaaagttactgaaatagattactttatagctcaaagtaatattagtaatgctaacatactaaaggttttggatgagatcaataatgctacaaagtcaaataatgaaaagagtaaggacattattggcattgagaatggtgttagtttcttggttagtttggcttctaaaatagtttaatcctatctgggtgagtttaatctgttgaatagtaagttgatagatttgaagaaaacgttttttttaataataagattcatcaataaattgatgtatcaagcctccccagaagattgtagctattgtacgtgttgcaaaatacctgcaccgcaatacgcagttgcaaggtttccgggattcaggaacttaatattgagcagcgttttggaaaaagaatcgacaaagaaatcgctttaggtgcacaaaaataggttgacatcaatcgttttgataccgtagagggggggatgacttctttgtgaaaccaaggatatcaaattattgcgacaactcctgataaaaacgattgtataattccggatttcgatatcacaaaaccaagggccttattttccggaacagaaaaagacggattatctcctgaaattatggaaaaagcggatggttttcttaaaattccgatggtaggttgtacagaaagtttaaacatttccgtttcggcagccattatcattcaaaacctgaccaaccgattgcgaaattcagacatccaatggcaattatcagacgaagaaattctggaaaagcgattgatttgggcaaaaaactcagtaaaagatattaaacgaatcgaagcaaggtactacgaagaaaatcccaggtaataaaaatagccacgaattcacgaattttagtaaaaatgtattcttgaattcacagcaaaaaacctttgcaactctgagcctttaccgctttgaaccttttgaagataatagcagatagaaaaaaatagccacgaattcacgaattttaataaaaaaagcattcgtcaattcgtggctataaacctttgctcctttgaatctttgccactttgaaccttttgaagataatagcagatagaaaaaaatagccacgaattcacgaattttaataaaaaaagcattcgtcaattcatggctataaacctttgctcctttgaatctttgcagctttgtacctctacaaaatcaaaaaagaacattcgtgaattgcttcgcctgttcgctatcgcttgggtcgtggaaaaaaaactttgtccctctgagcctttgccgctttgaaccttttgaagataatagcagatagaaaaaaatagccacgaattcacgaattttaataaaaaaagcattcgtcaattcgtggctaaaaacctttgctcctttgaatctttgcagatttgtacctctacaaaatcagaaaagattaaaaaagaacattcgtgaattgcttcgcccgttcgctatcgcttgggtcgtggaaaaaaaaacttagtccctctgtacctttgccactttcaaccttttgaagataatagcaggtagaaaaaaataaccacgaattcacgaattttagtaaaaaaagcattcgtcaattcgcggctaaaaacctttgctcctttgagcctttgccgctttgaaccttttgaagataatagcagatagaaaaaaatagccacgaattcacgaattttagtaaaaaagcattcgtcaattcgcggctaaaaacctttgctcctttgaacctttgcagctttgtacctctacaaaatcaaaaaagaacattcgtgaattgcttcgcctgttcgctatcgcttgggtcgtggaaaaaaaactttgtccctctgtacctttgccgctttgaaccttttgaagataatagcagatagaaaaaaatagccacgaattcacgaattttaataaaaaaagcattcgtcaattcgtggctaaaaacctttgctcctttgaacctttgtagctttgtacctctacaaaatcagaaaagatcaaaaaaaaagcattcgtcaattcgcggctaaaaacctttgttcctttgaacctttgccactttggaccttttttaaagtgaaattttgggctaaaaacacctataaaactatcttccaaaagagtcataattgtcttcggcatatttttcaaagcgttttaacaatacgatgttttctttttcagtagtggttagttcgttgtttacattgtctgaaacaggaatataccattctacactatcaaaaaactgacgaactgttttggttttaaaagtcagtccgtgtcttgcgaaaatggtgtttcttagaatctctaaatcaattttctttaaattttttaaatctgattcttttaatttttgcgtagacgagtttatcgtcataatgctttccgatgcagctctaaataccgcttctatgtaagtttcagcttcttttccctcttcaacctctaaatctgttacttgttcttctcttgggttttcataatcaatatacatcccgtctttcggaagcatcacattaggatcatacttaaactcttttttaataagttcaaatttccttttagagacttctttcttaggattattggctacccagattccagttaaaagagtgtcatttttgatctcaaaatcaaaaacaccatcatttttatcatcaccaggttctttaagtataaaatgaacggtgctgccttttatagtcattgtaccggtaaggggcctgctatttccggcaacaatactttgtcctgtaacttttgaggatgtgattctttttattacaatattgattttgttgatgtaattttctttcgctggtttgctggtatcgcgttccaaaatagtaaagtcacctacgtaagaaccatacaaatcggttctaatttcttttggcaggtctttggtaatgtcttttgtcgtttttttctctttagaattacaggaaaaaagtaatattgatagtagtaaacaaaaaagttttttcatttttttaattggttataaagataatactcaacgattaacaaattgggaatccagcccaaccatgcaataatctgatacaaatccattggtgcgggatgaaacaaatatacaagaataaccttccaaaaacgtagtgttacggcagaaaaggttagggcaaaacttcgtagcataaatgctttatgtttcagaatgtttttgttttttatagccgtaaaacctttaagagtgaagtaaaaccaataaattgacaaggcaacaaaagagatcttggcgaaaagtccaccgttagcgaaaagaccaataaataatcccgacggagcactaaaaaggagcactgtaaaaacataaaattttccaatatttcgatgagttgcaggatgtttttttaagagaatatcactgaattggaaaaatccggcgagcaaaacaaaaattgcagtatatacatgtatgtaaaagaaagtaatgtaaaatggaatttcggaaacttcagtctgtttgatttgaagaaaagcaatgttttttttcagtggaacatattgtaacgtgagctgtaacattaaaacatagaagtaactaaaaaggaaagtcccaattaattgcaatgaaaatcgaatattctttttcaatttttttttgtaaaggatttattagttttcaaatataaaaaatccctaattgtaaaagcggttgacgttagctattttcaaaatttccaaaaaaaatagttccgaattcacgaattttagtaaaaaatgcattcttgaattcacagtaaaaaacctttgcgtctctgaacctttgcagctttgaaccttttgaagataatagcagattgaaaaaaatagtcccgtattcacgaatttttaaaagcattcgtgaatacgtggctaaaaacctttgccgctttgaaccttttgaagataatagctgatagaaaaaatagtcccgtattcacgaatttttaaaagcattcgtgaatacgtggctaaaaacctttgcagctttgaaccttttgaagataatagcagatagaaaaaaatagccacgaattcacgaattttagtaaaaatgtattcttgaattcacagtaaaaaaactttgttcctctgagcctttgccgctttgaaccttttgaagataatagctgatagaaaaaatagtcccgtattcacgaatttttaaaagtattcgtgaattgcttcgcctgttcgctatcgcttgggtcgtggctaaaaaactttgctcctttgaacctttgcagctttgtacctttgtacctgtgagcctttaccgcttagaatcttagagacttagaacctcttacaaagtataattcaaattaatactccatctgtaattggcttccatgtttccatttgaaaggttctgagtaattggcagcattgcatttacaccaatcgagaatttatcttttccggcttcaagaccaaatttcccaaacaaaatatcgccggctgtattgggtaaattcagattatgctgtttattggtttgataaagttcacctgccaatccggcttgcggaacaatttgaattgattttgtattaaataaataaaagaaagtggcagcataattaaactgatcaccgtactgataatttttgctgttttgggttttaaaaatataattcagagtagtatttagtcccagatttttgcgttttaccacatactcagtggccaacggaaagtcccagcttccggtccccaattgaaaactttggttgatacttcctatattattggcttccgtaaattttccggttggaattttaacaccaccgccgaggcttactttatgtgtaaatatggtactgtctttttgagtttcaaaaaccgtgtacaaagccattaccgtaatatcgcccaaaccggcaatattttcggttcctgcagttaattgtctttcatgaaaatgatacggaatcaatgctgaaatttgtactttttctgtaactggtatacgtgcccatgcctgaacagtattgaaattttcgtcaatccacggagagttcgcaaagattccgtcgcggctggtataactttgtttgaaatatctcagacctacaaaattgttgttcagcatagagctaaatcccatactccctccacttgccgaacaaccacaggcgtcacaatcgaaatcctcgatcaaagccatacgctgaaaagtgaaggcggaaatactatctttcgaagtaaaactaaagactgatgaaccagtcaaaagggcgaacattactattatttttttcatcttaattatttttagaagctaatcccgctttcggctttatctttttgggtgaagaaaaatcacccaaaaaggataccgcctctatcggggctgggacttcggttttcattatgttttttattacagcttatatatttctacagaacaataatctgcggccgtatttttaaaattccgcaaaacgtttatcagttaaaaatgctgtatccgttaacgtttttaggaaagctatgatttgttttttatccgtttcggaaagtgtgattccaaactttccgttttgttttaggattacatctaaactaggggaatctttaactccttcagaataatgattaagtacttcatctaaagttgcaaatcttccatcatgcatgtatggccccgtcttttcaacattgcgtaaagtgggcgttttgaacttgcccaaatcatccgctaaatttgtaaccctggctctcccttttttgatcataagctcagtgtcatcagtaaaattgctgtcaatcccgttgttgtgatacaaattgtcagttaataaaggagtcttatgacaagagaagcaaaattgttccgcaagttggagtccttttaattcattttcatctaaatggcccccggtttctccacggacatatttgtcatatcttgagtttccagaaatcatagttcgctcaaattgcgctattgcctttacaatatcagcttgattaatcgcttttccaaatgctttttgaaacattgcagggtaatgagcatcctcatttaattcctctattaactctcctaaattctgatgcatttcatcttcgtgagctagtggtgcaaaagcttgagattctaaattcgtagaacctccatcccaaaatagcccattagtagcccaggctaaattcattaacgcaggggaatttcgctctaatttttttccggaaataccattattagttaaggcaaaaccatcagaaaaggctaaattttgttgatgacaagttgcacatgaaatctgattgtttccagaaagtcttttatcaaagaacaatttttttcctaatgcaattccgtctgcactgagaggatttgttttagaatcaataaattcagggaaattagcaggaatcgtaaccaatggttgtagttcctgataagaatcatcaagatcattacaggaaaggcttagaaaaaccaatcccataatgctcccaattttaatgcttctgtttgtcattaattattcgatgcttttaaatgtaaaaacattgtttttgtaattatcggctgctttagccattaattcaggcttattggcagacacttttggattggtaactaaatcaatgtccttaacaattttctcaacatcaacatttaagttcaatttagctgttttgcttgcgcttactactaaagcagttggtaaagtaatttctactgttttgtaatttgtattcaggcctgtttctacagaaatggctacgggtgtagttggtgttacatttttaccaatcaaactagagaaaatataacttgtatgccacatccatgaaacattcgtcattccgttaagttgagataattcaccattctgaatactcatattatcattatgagttgcgtcaacaccaacagagaaaataagttttgtataggaacccgacggtacatttgctaagtctatcgtttctcttttggccgctgcatatttgtatttttcctgaattaaaatttcatttgtttcttccatcaaaaagaaagaatttgctaacgaataggttttgttttgatcgcttaccaatttcatatcacttacccaataacgtaaacgttcaaatttgtaagattgtccggcaatggtaaatggtgtgtttagggcaaaatctgtggttcctatttttgaatcaaaagtgatttgtgtatttccactaacatcaggtgcctgtgcatcgtcactagagcatgcgctaagagctattaaagaaataagaattaaggttatgtttttaagttttgtcattctataagtttttataataaattgttttttaaaattccgaaaaacgtttgtcggttagatagcttgtatcagttaatgttttcaggaaagctatgatttgctttttatcggtttcggaaagtgtgattccaaattttccgttttgttttaatatcggatccagagttggtgaggattctattcctcttgcatagtgatccagaacaccttccagagttccgaatcgcccgtcgtgcatataaggtccggagacttctacattccgtaaactgggcactttaaatttgtagtaatcgctcgccagttcggtgactttgtatcttccgacatcattcaccattgggtttacagccagaccattgtttcgaaacgaattgtcggtttgtaaatcagtagcatggcaggaagcacattttgattggaacaaatcatatcctgccaattcgtctgcagttaaagttccgccggcctccttacgtctgtatttgtcaaattttgaattagaagaagtaaccataaccataaactgcgaaagcgctttcagcatgttttcggttgagatttctttgtcagtaaaagcctgtccaaataatttttggtattctttgtcggctttcatcatttttagaatagcattcagattcccattcatttctataatactcgtcaacggaattataggctgcaggtctaaatgatccgcagaaccatcgtacataaacacagactggtaagccagattttgaattggaggagtatttcgtgttccctgagcatcgtttacaccatgactaaccgtgtgtccgtgatgagtgaaggcattagcctgtatgtgacaaaagccacaggaaacaactccgtctgacgctaaacgtccgtcatagaatagttttttgcccagttcaaatccttttactgttggaggattctgagcaatattgtacgctaaagcggggaaattagaagggactttaaattctaaaggaatatttacatattcttcctcttcattcgaacagctccatattagcggaatcaatagccaaagaaagtattttattttcagcatgatattttgggtgtaaaaagagtaaagagcattttttattactacctgcgtgagttagcacaaagtagaacaaactaaaaattaccgggattactctttgatttgcagaagtatctgtgtttttttccgttaccaatatgctcttgtgtccattttagcggacacaaaagatacggtatagtggattgtttaggttttgcctaaaggtttgtacttcttaaaaaataaattaatcgttgtgtacgtggtcaattctaaacattgttgaaatgttttgagtgattaatggcagttttgcgccacccataatcatggcacccataccacccatattattatcggaaagtttgattttgttctgaccgtcaattattttagaaagatctgttataatatgaacagcaggagtaatgttagaacgaaccaaagcttttgttggaaaatcgacagttacttcagtatagttgtaatctgttcctgtttttccggtatggatcataaatggcgtagcagttgtaacagtcgatgaggtaaaagtaccttcgaaagcaagaaatttatatccggcagcccatgaccacatcataccggcagcgtctgcctgtgcaagaaaatctccctgacccgcagcacccagtttccattgcgcttcgtcaactccgattccgaattttactttcacataatcacctgctggaacatctgttagtttaaattgctgaccggcagcggtagattcgtcagcaataaagtagcttttgcttttgggataggtaaaagtcgttccgtctgcttttgtgaaaacaacattgctcacgatatacttcacaaggttgacttttagtacttcgttgtttgaagttatattaccctgtgtgtttaaaataagatcgtttgtaccataagcattgtcgaattttaaagtgatgtttccatttcctgaaacagtttcgttattgtcgtcgtttgaacaggaaaataaagatatagatagtgctacaatagcaagggctttgtataaagtatttttcattttaagaattttatataattgtaattttaaatttttgggtgcgagcaagcacatttttcattgttttttaggtacaataaaaaatcatttcaattgataatgaaacgggatttaaaaaattatatgactgtcctcaatgtacaccaagagtactttttcgccactgattttgcagatttacatagattttatacacaattaataaagaaatctgtggaaatcattttaatctgtggctaatattaccagcttggtattagtcacgaatagtcataaaaaattatataaaataggagggaggatgaaaagtagtaatagaaaccgaaataggtttttcgtctaaagaagcataaatttttgctttagattctataggtgctactaatttaaaatcggctgtggttgtattttgaatgtaaacgatctctgatttttctttcaggttgttttgcattttcttttcgttgtcagcgtatttttttaaacttttctgaagttcgcatcgaccgttacaggtgttaaaaattaatttacgctgcacacaaatcgtttttacgatctcgtcctgatttaatttgaaagaggtataaacaacaaaactgccgaatgagggcactaagagcatacaggaaagaaatatggtaaataacttcttcaagagtagatttcgttgtttcgaatgcaaaaatacgttttatttattttagtttgaatgtaatttatatattttaataggtatttattatttgatttgtttttgtacttttttagctttttgaggttttgttttaggagtgttgaatttgtcaaaaataacttgctcataaataccagctgttagaatttcgtcttgttttattatcacatcggtatttaaagtaatggattcttcgttattatctaagccttttaaaaactcatcgattactgagaaataatctgtagtaatatgaagttgttttttatcatctctatagccacttagtattggagtaagagtaagataatttgttttttgaggaattggaattatttctgaatatccaatatataccttatcatttttcaatgttacttgaataaaagaagcttcgtttactgattttttaaaaagtttttccagttcatcaccatttttatctactgcccagccaataagttgagattttttgaatttccataataaatatacattggtgactaatactagtaggattgaaattagacaagaaaagactattgtgcaaaggtaatcaaccttatttattggaataatttttaattttagaattaaataatatgttaattgagtggataaatagtaccatattatgtaattaaagttcaaaaaaatataattgacttgtatttctccaaatcagaagtaactaatttagaagaaaaaaatatagaaataagaactataaatgaattagttatggatattgaagcagtagttgaggataaatttttatacaaaaaatttccaaaagaaatacttaattcagttgttgaagatattagttttcaagatacagagtttggctgttttacgatgtttattgctttttttaataatgtgattatcaaagaaaatgaaaagtgattttttaatatttctggcaattaccggattattgttaattcttctttacttcttcgagtacaattttaatttttgtatttccaatacattttatcttgtaagctattttttccctgttttattagtgtttgtattagggtgtgtatattatttgataaagtttataaaaaagaagagaaagtaaaaaacgtaaattaaaaaatatgagagcgcacttcatttttttgtttttttctttattagttaatgttgctattggtcaaacaagcagcaaagttgataacgaagattatgaggtaataaaccaaataacaaatagtttaatagagggtagaaaacagttatatgtaaaggataacgatacagctgtagctctttatgaaaagagtctagtatttaaagatcaaaaaagattcttcactaaaaaagcttttgaagagtatttttatacaccgatagattctgtaaaaataaaaaagctaattaaatcaatgaactttgaatatttagccaatcaaaagagagaagaagtaaattggaatttaactaaattcaaatatccttttataaaatatagtgaatcgacaccttatgaagctattaggtttagtgtctcacctccaatctattccaaagacaaaaaagtggtttttatttttttcagtaacccctgcaattatgatggatggggtgctactacagtaatagtttgtaagaaagtaagtaataaatgggcttgatatctgaactttccaattacttaaagttaatatttttaagtagcgataaagattatgcaaaatagatatgcttgtactgattttggtattgctgttggtaaattaggagggattaatcttccttcaacaaaggcctccagttttacttttaatggtacatctccagggaatttaggcgatgatgttagaaatggtaattttctaaatacgacaaaaacgacaactaaaagcaatgctccacagagaaaaggatattgtaattgataatttaaattataacaaatgaaatgtctaagtttagtactagttctgattcttggttattcggtagattcatatggtcaagagaataatgaaataaagctgataagagatttttataaagcattatatattaatgatattgatccagaagaaatagttgctagatatattaaatgttctgatgcagatcaatgtaaaaaaggtgcatatatggtgatggactttcgtaatctggctaatgaagaaaagggaaatttctttttattaaaaaaagatataatggagaataatttttttatctcttcttataattcttttcctgagactgataaaattaaattcaaaaatctagcaggagacaaaaggaaggagatttataaagttgatctaaggaatggtgctcctcagtattttttaatcgaaaaagataaaatagtatctttttttgggttccaaaaagctggttccgaagattatacttttatagttttttagtaatgtaatattgtagaaagagaatttcgtcaaaaaagaaaggaggttgctaaatgaaaattaataaatgtatgtttttagttgtcgtattactattaaaaacaccgactattgcatgtcagaataaaataaatgagactgacatggtaactaattttgtgaaatctgttttttttgaagagagatcgacgagatttattgcagataattttatctgttttgaaacagtaaactctgatgtaaagtattctttagatgaccgaatagagatacttagtaaacatttgaaaaagataaaagaagataaaaaagtgctcttaaattcagaagatttttatgtggtaggctataaagactataagcatgataaagtttttttttctagagataccgataaaatttttattttaataagtaaaaataaaccagttgaatatttctatttaatagacggcagaatactctcttttgattatattcttaaaggagatgagggggggtttataacatattaaactcttatttataagtttcttaacctgtttgttaattcgaacaggttttttggtgaagaaaagaactttctaagttaatttatttattataatttttttcctacatttgcaaaaatggatttgtgtgaaggatattaaaaaatttgccattgttctaattgttttggggcttccgatgttggtcagtcattggcttttaatgaaaaagaaagaaaaggaaaaaatggagaaatttattgttgttgacaaagaaaaattttggttggaactgtatcagcctacagcaagaattgattcttcatttaagaatcaggtttatgattgggataattatatgccaggaaaactttcgaaaacaaatttgaaataattgtatttaccattaatgataactgatttactggctaaaaagattagcagtaaagttataatacagtagaaaacaatcattactgcaccctaaacttctcccgatactcaataggtttcatgcctaccattttataaaaaactttcctaaaggctttagggtcattatagccggttttttcaataatttcagaaatcgaaagttgcgtttgttctagatatttctttgaactttcgactcttatattttgcaggtattcaataggcgggatgccggtaacctgtttgaagcgtcgcgtcatatttcgggtgctggtaggaatgtctttggtgatttcttccagtttttcgatcgtatggtactgactttctattttttgctgcagcatggcaactaaagcatcattgtgcaaatggttgggtctaaaagtactgaaataactctgcttgtatcggtttaggtcgatcgaaaaaatctttgcaatctgaactgcaatctcatttccacaatatttctgaaccaaaagaatcaacaggtgaaatgttgaggtagagcctccgctggtatacaaactaccgtcggccgttaaagtttcttcgggcttcaattttacgagtgggaacgctttggtaaaagcactgcaggcatcgacatgagttgtggccaacttttcgttaagcaaaccggatgcggcaaacaaaaaggcacccgtacaaaaactggccaactcggcaccggactgatggtgctttttgagccatggaataaagtttttgttttttgtgatcatttcgctcatattatccgtagtaaaagccggaattagaataagttcaaggatagttgcagaaccttcaatcggatttactttatagccaaacaaatttgcttctttgatctgttctgtcaattgaaataccataatctcaaaaggcttttcgtcttctttagcaagtttgttggcagtttcaaaaacttctaaaatggccgctatacttagtaatttatagtcgtgcggaacaattaatcctactttcttagtcatgattgcattggtttttggaaaaatgagaggttacaaaagtaagtattttgtcttaaatgaccctaaaaatgacttttaatgtaacttaaagctaatgctaaaaaactaaatttgctttaaataatttgtaattttataaagaaagatctttgattttaataaataaacaatgataaccgtacaaaacacgattaacgcagctgtaaacaaagtctggaaattttggacagcgccggaacatattgtaaaatggagttttggttctccggactggtatacccctcatgccgaaaatgatttgaaggctggaggtaaattcaaatatacgatggctgcgaaagacggaactgccacttttgattttgaaggagtttatatccgggtagaaacttttgtattaatagagtataaactatccgataacagaaccggaagtgttcattttaaagaaagtgatgaaaaagtaattctcacagaagtatttcaacctgaaacagaaaaccctgaaaacatgcagcagcaatggtgtcaggctgtgattgactgttttaaagagtatgttgagaataactaaataaaaaacgaaacaagaaccaattttaaaaatataatttaaaaaaaagaaacaaaatgataacagtacaaaacacgattaatgcatcagtagacaaagtttgggaattttggacagcaccggaacatattacaaaatggaattttgcttctccggattggcatacacctcatgctgaaaatgatctgagagttggaggaaaatttacatcgactatggcggcaaaggatggtagtatgagttttgattttggaggagagtatactgtagtagagcagaataaagctattgaatacattttagaagatggaagaaaagttgaaattacttttaaagaaacaccgagcggagttgaggtaattgaaaaatttgatcccgaaacagaaaactctgaagaaatgcagcgtggaggctggcaagccatcatggataattttaaaagttataccgaaagtaattagtttttttaggctcaaaggttcaaagaagcaaagtgacaaaggcactgattgacaccacagagatagaatttaattttaaaaagagttacaatgacaaaacaaatttggctgaatttgccagtaaaagaggtggcaaaatcaaaggcttttttttcggaaataggattctcttttaatgaagaacacgacacaccaaagtcaacttgtatggtgattggagaaggaaaatttgtagtaatgctttttgaagaaaaattgtttaccagtttttctcataatcaactaacagatactaaaacaagtacagaagttctgatctcgattgatgctgaaagtactgctgaagtagatgaactggcaaggaaagttaaacaagccggaggaactgtttttgctccaccgtcagaaagccagggatggatgtacggctgcggttttgcagatttagacggtcatcgatggaatgttttatttatggattttagtaaactatcatgagtatggaaacattagaatttaaaattagaattaaagccccgatagaaaaagtttgggcagttttatgggacgaggaaacgtataagaagtggacaggatctttttgcgaaggttcatatgccataagtaaatggaatcagggcgataaaatacatttcttgtctccaaatggagaaggaatgaacagtgtcattgaaacgaaaattccaaatgagtatatggcttttaaacatataggcgaaattaaagactttaaagaattgcctcttgacgaagaaaccaaaaaatggacaggtgctatggaaacgtatcgattgacagccgatgacgaatttactgatttggtagctcaggtagatgtagtcgaaaaatacatcgattattttaaggaagcatttccaaagggactggagaccgctaaagaactctcagaaaaataaaaaacaaacaacaaacaaaaaaacaaatatcatggcaacagcagtaaacccttatttaatttttaacggaaattgcgaagaagcatttctgttttatcaatccgtttttggaggagaatttccgtatatcggaagatttaatgaaatgccggaaggcgaggaaggatgtggtgctccggtatctgaaaaagatgctaaccgaatcatgcacgtctcattgccaattggaaacaccatcctgatgggaagcgacagcagtgagcaatccggagatgtaacctttggaggcaatttctccatttccataaatgtggacagtgcagcagaaggagatcgtatttttaacggactttcggcaggagggactgtttatatgccgatggcaaaaaccttttggggagcttattttggaatgttcaaagataagtttgatgtaagctggatggttaactttgatgaaaaccaggcaggttaaaaacaacttcttatattttatcactatacaaaagatttcagggattcaccattttaatccttgaaatctgtgataaaaaaacaattcagagatcgaaaaagttaggttattccaatccctgaacattattgttaaattactccaaaaagcacagtattaggtgttttttgtttttaaaaaacaagcaatatccttttttatcaacattagattgccgatttttgtcgcttcgtaaaatcaataaacataaaatggcaacagaagataaagagattattttattaaaagtttcaggacatgataaaataggagtaacagcaggtttaaccgctgtattggcaacttatgatgcaaatattttagatattggtcaggctgatattcatgatacactttctctgggaattttattcgaaattcaggcaggttcctcttccggccccgttttaaaagatttattgttcaaagcttatgaattagaaattaaagtaaaatttattccaatttctatcgaggattacgaaaagtgggtgaaatcacaatctaaacaacgttatattatcaatattttgggcgaaaaactggctgcttctcaattggctgccgtaaccaaaataatgtcggcccaaaatctgaacattgattctatcataagattaacaggaagaacttctattgtagatctggaagaatatcctcgttcctgcatacaattgtccgtgaccggagagatcgtaaataagattgacatgacagcaagttttatggaaatttccagaacgttaaatgtggatatttcctttcaggaagacaatatttacagacgaaacaggcgtttagtttgcttcgatatggattcgactttaattcagaccgaagtaatcgacgaactggctgagctgaacggagtgggagatcaggttagagctatcacagaatcagcaatgaatggcgagattgacttcaacgaaagtttcaaacagcgtatggcattgctcgaaggattgagcgaagatgttttgcagaatgtagccctcaatttaccaattacaaaaggagcgcaccgcttaatgaaagccctgaaatattatggatacaaaaccgcaattttgtccggaggatttacctattttggtgagtatcttcaaaaagaattgggcatcgattatgttcatgccaataaattagagataaaagacggtaaacttaccggaaaatatataggcgatattgtagacggtcaaaagaaggccgaataccttaaagcaatcgccgacaaagaaggaattcacatcaaccagaccattgcggttggagatggtgccaatgatttgccaatgatcaatttagcaggtttgggaatcgcttttcatgccaaacccaaagtaaaagaaaatgcagcaacgtcaatttcaagtttgggtcttgacggagttttgtatttattaggctaccatgacaggtatattgatatgatgtaaatctattgtcgtgctgagcaaagccaaaggcctttaatgccaaaaagagctttgatcttgctcattttggtcaggctgagcgaagtcgaagctatgggcatgccccactgaaaaagtaggtcgggctatccattgcgcacaagcgaagtaatcttttgtgtccgtcgcggcggacacaaaaggattttctcttctatccctcatgggttgcattggaattacagtttcttatttctctctggatttcaattcagttttaatgtcttttgaagtcttaaaaattaaaagaagtagcggtagcaaggcaataggaacaatttgaacagcgctaaatccttttaaaaatacaaggtagatgttagcgataattaataaaagaaaaattacggcaaatgcatacgcggctgattttgatactttttcgcttttacgtaactcttcagtagtcattttactaaattttttgttgctcattttatgttggttttgggttaattgaatagcgtattttgagattttaggtcgcaggatggtttagtttccacccctttcctattaaatagtttttacattttaagcaaaaattggtttcttcatctaaatgattttttccttcagcatctctcattaaacatgtttttacaggacaatgaggcagaccttcggtatgacctaattcgtgcaaaacaactttgtaaaattgtacttctttatttcttttgctgagcctaaaatcagaaacgacgcaggattttcccggatgataccccagtcccataacgccccaatccttgtttttacctttggtaacgctaatgtcgctgttggataagcccacaattacagaatctttgcccacattctctttgatggttttaataatagtgtcggcacgatacctgtttcgggcttggtaaaatgcatttttcgggaagggaatattggctcttaaaataacattagggttaatcgttttgattttattgaagacactttttgcctgttcaattttgaaatctcctaaaggttgaataacgattattttttgatgctgctcttttgtattggtacaagaaataaaaataaaaagtagaatcagaatggcatttttcattttgtagattctaagcacgttaattcaatattcttaatggctcccagaggggcaactttgatggcattgttttttggagtaagataaaaatagtaagcactattaacatcgatcaaaaaaatggtttctgtttctcctgtgttaaaggtgagtttttgttcgtattgcagtttattcgacttaattttttctgcgattttgtacccttcaccaattcctaaaccaaggaaaaaacttaacagtccaattccaatcgaaattaaaaaaaaatgtttcagcttgctcttgatctctatgtctgagaatttattgccatccggtttggtgccgattattttttttgcccagcttttgttgcgatgcttgtagcataagctgataaaaagtatgataaaaacagcaaaaacaattagacttaaaatgataattggattcgctgttagatcagcaatggggctgacaagaatatccataatggttgaatatttcagaatgtttattttcaattggaaaaagaaaacgcattcttttaaaattcccagcacgacaagaaacagataacctattggaagtgaattctggattttttctattgattccattcgaattaacgcggtttttgattgaggttcttcttttataagtcgttttgttttgactagcctcctgctttagttggagaaataaagattgaaacaagttgagactttagccaaatatgtttagcaaagtagaatttggctaaagccaagtttagatatgttttgtaccactatctaaagcttgtgtcaatcgagattgggtaattctattagctttttaattacaatagtctatttatttcaaaatttgatttatactccgcatattcagaagagttaatgattttcatgtcttttaaccaattaatccgattataaaaatcatgttctgaaaagatattatcaaaatttgtatatttttccttaagataaattcttgtatttgttttaatcttttcaataaactctaaaacatttttctcctgaggtatatctcggtagaaaacaagagttgtttgtcctccggttaaatatatgtcgtcttgatgttgtttaaaatatgctattgaagctattgtcccccagattatataattgaatattaaggttccttgattaacttgagtagtgaaaatatataaaattgtcaaagcaattataagagtaatgcaaacgcaaaaaaaaagttttccaggaatagtattatctgatctatagtgtatatcaaatcccaattgatctagttttacttcgtatttatcatttttccgaagtgactttacatctacaattattttgttatccttcaatatatattttcgagagttaattcctctcttttgcaataaatctacttctgtcataatttgttcgtgaaaatttatggtaggcatttttacatctctttcagctgttccaaataatccctctgattcgaaagtctaggaattttatgttgtccgcctaatttgtcccgctcttttagccagtcgtaaaacaggttctcacgtgccacattaatcaccagaggatttaaagtcatattgttatgacgtttggcttcgtaatccgaatttaaagtttgtagtgtttcatccagcactttttggaaaagccccacatcggcaggttttttcttgaactcaatcatccattcgtgggcccctttttccttgtcctgcataaaaattggcgcaacggtgtaatcgatcacttcggtgtgagtcagttgacaggctttggcaatggcctgatcggtattttcgaccattaattcttcgccgaaaacattaatatgatgtttcgttctgcctgttactctgattctgtatggatttagagaagtaaaacgaaccgtatccccaatcaaataacgccataaaccggaattcgtcgtaatgacaattgcatagttcttatttagttcaacatcagccagacgaattactttttgatttggagttccaaacgtatccatcgatatgaattcatagaaaatgccataatccagcatcagcaataaatcactcgaattgtttaaatcctgaatggcaaaaaagccttcagaagcattgtatatttcgtagtacctgaaatctttgcttggtaaaatatttttgtattgctctttataaggagagaagcttacacctccatggaaataaacttccagattaggccagagatctaagagactttcttttcctgtattttctaaaactttattcattaaaaccagcatccatgacggtacgcccgcaaaactggttacattttcgttttttgtttcatttataatggcagcaattttagattcccattcgctcatcagcgaagttttactgctcggagtactgctaaactcggcccagattggcatgttttcaatcagaatagcggataaatctccaaagaacgtattgttgttctcgtagatctgagaacttccgcccagacgaagacttttacccaggaacaattccgaatcctcattgttgttgaggtacaaacaaagcaaatctttacttcctttataatgacaatcctcgagagcttcattactcacaggaataaatttacttttggcattcgtagttccgctcgatttagcaaaccattttattggcgtttcccaaaatacattctgttccccctgacgcgtacgttcaatcaatggctgaagctcctcataagtagcaatcggtactctttcagcaaaagtctgataagaattaatcgattcaaaatcatactgtttccctataatagtattttctgaagcggtcagcaaattgtgcaacagttcttcctgaacttcattcggatattttagaaaaagttctatttgatgtatcctttgttttaggacccacgaagcgaaagagttgattattgataagggcatgggtgaaatttatattttagatttctgattttagattttagatttttagattcgcgtaaaatcaggaaccttaaaatttgaatatcgaaagacaaatagtaactttgccgttgtatcaaaaatagtgtttttttgtaaaaaataacatgctatttttattaaacattccggttcggctgaattttaactcttaaaattcagaattcagaccgacaaatctaaaatctacaatcagcaatctaaattctaatgacatatcaaggcgtacttacaaaaatgcaaactgaaatgggggctccaattcagtattatttggtatttgaagacagttttttaaacatgaatcaattactgaacaaagaaattgagattaatttcgtcgggtttgaatgtctgaattgccacaagaagaaaaagatctaccgtcagggattttgttatgagtgtttttactcaagccctgctgttggagattggattatgcgaccggaactcagtaccgcacacttaggaattgcagaccgtgatttggagtacgaacaaaaagtacagcttcagcctcatgtggtatatctggctttggcaagtgaggtaaaagttggagtaacgcgtaaaactcaagttccaacacgctggatcgatcagggagccacgcaggctattgcgattgttgaggttccaaaccgatatttagccggaattactgaggtggcattaaaagaccattatactgataaaacaaactggagaaagatgcttcaaaatacaggtgaaagtttcgacctgctggctgaaaaggcaaaagtagaaagtttgattccggcagaagtacaggaatatttttatacccaaaaaaatgatctgtatgaattgcagtatcccgttttaaattatccgactaaagtaaccagtctgaatctggataaaaccccaacttttcaggggaaattaaccggaatcaaaggacaatatttaatctttgagaacggaactgtttttaatgtcagaggttcggaaggttatgtggttagtattgccgtttaacatttaaagaaagaaaaacactttataaggaattgtttgttagtgttttagtatatttataatactgttttagtaaaattgtaatttgaatgttgaaacatttgattacaattttataataattatttattagaagattttaattttaaatctaaagagaacctagtttagcaaaaagcgaaatgaaagtttttttttgaatttccaaggacaaatatttaattaataaatggattataaagatgagtgttttaaaacgaataaatgtggtcaggcgcagcgtaatgcaccgtctcactaagaacatcggaaagccaaggtcagagcagcatattgttttagtggataaaacagaaattaggcgggtcctgatctgcaggccaaatgccagactcggaaacttattattgattacgccgcttgttcaggaagtcaacgatatgtttccaaattgtaaagtcgatttgtttgttaagggagctttagctctggtcatttttggaaattatcaaaacatcaataaggttattggtttgcctaaaaaaccgttcaaaagcttattggaatatctgaatgtctggatttcaataaaaacacaaaaatacgatgttgcgatcaacgtagatcaaaactcttcttcaggacgtttagcagtccaattctctaatgctaaatataaattttacggagatttaaatgatgaatctcaacttgtaaaaaaagactacgatcatattgcgaaatatcccgtttataacttccgaaattatttaacgaaacttggattagcaaaaagcaacaaaataatagccccgattgaccttaaactatcttctgccgaaattgctaacggaaagaaaattttgaatgacttagtgcctgattctaaaagaaccatctgtatttttacgtatgcgacaggagcaaaatgcttgtcggaagagtggtgggagaacttttacgggcaacttaaagaggaatataaagactataatattatcgagatcctgcctgtagaaaatgtttcgcaaattgcatttcaggcacctacattttacagtaaagatattcgcgaaatagggtcggtaattgccaatactgatttgtttattggagctgatagcggaatcatgcatttagccagtgccgttcagactccgacgattgggcttttctcggtctcaaaccttaaaaaatatgaaccttacgacaattgcagcatcggaatagatattaatttgcagactaaaaaggattatgtaaaaatcataaactccatcctgaacaatggaaaacttaatactataggacaagcaatttaaaattataagaaacaaaaaaaaggcatccgtagatgcctttttttgtttagtttttcttcttaaacaagccattgattaagtcactggcttttttagtaacctcttgagttttttgctctttttcggtagcggcagctttagtggtatctttagctttagtgtttttattgataaaatcgttaagagccgaagttcctttttgagtcagtttgtctctttgcagattcgcaacctgcgtagccagactggtcacagcacttttcatatccgttgatacttttggatgcgaaaaattacctgtaagcacagcatttattggaatgttttgcagttttgcagcatctgcaggagacattttagcaaggaaggcattggcttcatttcctaagtattttgccggaacatctaattttaaattatagttcatcgtttgatcgaaaccatgagttccgccaattgtaattttaatgtcctgatatttgatgtcaaatggttttacgctcacttttccgttatcaaatgttagagccgctttaatatcattcaggtttattttattaggatcaataaatttcaggttagaagttaaggcattgataacggttgagtttttagaatttacagtagttgaaagcagctgtcccaaaagatctcccgagattgattttagatccggagtcaactctttatcgtctaagtttccgtttaattttatagtcgaatttaattttccattgataattcctgccaaaggagcaatttttttcatcatgtctaattgcgtaaaagtctgcgcaatatccacctgattgaaacctaaattcatgtcaaaagttggcacttttgttttggtagaaacagctccgttaagaccaattgttcctccaaaaatagaggttttaaagttttctaaggtagctttttcgtccttaacgattaatcgtcccgaaacgtcttttagtttcagattgtcgtataaaacggtagtggctttagcatttaaagtacaatttaaaaacgccggaattttcatcgcttcagtaggttttgcagctgctttttctgtagcaggagttcctgaagtcataaaatcattcactgccagctgatttgaactcatattaaagtttcctcttagttcttgttttttgaacatgaaaccatagaaattttccagcactccgttaatgcttaaatcactttttccggttgtggcgtcaaattttttcaggttgatggtactcggattgaactcgaccaatgccgtactgatgttcatcgatttattgttttcgtccgtatatttaaatccggacaaactcatggttccggcatttttgatattctggtattgacttttttcaacagaagccatatcaaattgtgtagtcacatcagcttttaaaacaccggcaagaggtttgtccattttaattggataagctttagaaagattcgccagattgatggttcctttcaaggccgcgttcacgatagggttttgcgtgatgtttttgatattagctttggcgttaaaaacatcctgatcgattcggaaggaaagtttatccaaattaacataagtatcgttcaggattcccgtttcgttgatgattttcgtgtcaattacaatattctgaaccgattttggaaggtttggatattgaaacgaagcattgttagaaacaattgccacattaaatttaggaacagtagtttcggttaattcacctttagcaaaaccggctacagtaaaatctccggttgtttttacaccgtccagacttgaagcgtaagcagaaggaatcagtcctaagaaattcgtaaaggatgaagtgggagtcttaaacttcagatcataaatttgtccggcatccaccatctgaataaacccgtcaaattctaaaggcaattgattgattaaagctttattctccttaaaagtatatttgcttttttcaaggtcaattcccaatacagcgtctaaagttagttttacatttttcatgtaattgatcttatccatatccaatgaaacattagcaacagattttgttgttaaatctaattttgaattggtaaaatcgcccgttccttcatggttcaaactgtctatgaccatttttattttagatccctgatcgatgtatctgaaagtgaaattttcgattttataattttgaattttcagtgaaagcggtttgcttttgtcgtctttcacgtccttttctttgtcttttagtgcaatgtcaaaattaccaacaccgtctttgttgaaaataatattcaccagaccattggtagagctgattccctgtatgtttaaaggttcttcttttcccttgaaaagttccttaatactcatttttaaattcagctcgcctaatgaaaccaaagtatctccttcaaatggagctttattgatgatcaccagtttttcgattcccacagtggcatttggaaagtttttaaacaaacttagatcggcatctgtaaaacttaccttcgcatcaacacttttgttgatcgcttctgagattttagcttttatttgatctttaaagaaatacggaatggcaaataaggccgctacaaggactacaagaactatagctgttatttttaaaattttctttaccatataaataaatttgaggggttaaattgctaactgattgttgcaaaaatagttttttttgatggagttcataaataaagtttttgttaaacctaagaatatacttctgtttgttccaaataaaaatccgcctgaatataagttcaaacggatttttagagtttttatgattgccgattattttttaatgaaagaaataatcttattgaccatgatttctgagaggggcagattctcatttttataactttccagattggcctgatgatctccgtcgatgattttcatgacgtgattcattttatcaacgatcaggagttcggcatttttattggccttcgataagagttcagcatcttttacggtcacttgtaaatcctgatttccctgaacgatcaaaataggaacatttagttttttgatttcgttttgcggattgtatttgaaccaggaaattaaataaggctgaatgcttggtctgaaaagagcattaagcattgggtctactttctttaccgtgaatccgcttttcagactatcaataatcgggaaggttaattcctctacttgtttgtttgatttagaagcaatttgcgatttgatcaattggtcggcagattctcctgcacctgcaattgagataaacttattggctttggctccggcaatcattccaatcagagaaccttcgctgtgaccaattacaactacttcagagaagcgtctgtcttgttttaacagattgatccagcttttggcatcttcggtgtaattctcaaatacaagagtttgttcggagatagcagccggtttactttctgcaattcctcttttgtcgtatcgtaatgatgcaattccgttttttgccagtgcttccgccagcattttcagagaattgtttttcatcatcggattattgccgttacgatccgtaggccccgaacctgaaatgagtaaagctaccgggtatcttttttctaaattcggagtggtcaacgtaccaaaaagctgatcgatgttaatttttaaaacaataggagtttctgtaaaagcaacttcagttttattctgagcattcacaaaactcagcaacagaatagcagcgaggacaaataaattcttcatttttaaaaggaaactatttaatgtttattccaaatggaagcatggcctgaactcctttttgtttttgaagtcttttaacctgctcaataagcatataattttcttcgccaatttcttccttgataaatgcttcttttgattgcgcaaatggcagattggaaagaaggtcattgaatgttttctggtattcaggatagttttgtgtgctgtacgttttgatttttgcaatttttgcagcttcagcaatagcgtcattcaaacctccaatctgatctactaatccaatttttaaagcttcgcttcctgaccagactcttccttgtgcgatcgaatccacctgtgcaaaagtcatttttcggccttccgcaacatgtgttacaaaggttttgtaaatatgctcaactccttctaaagtaaaggctttaaatttttcgtcaacaggtacaaacggactgtaatttgcagagttttcatgtgtttttacctgctctgtgttgattcctaatttgtgggctaagggagtgaagttaggcagtactccaaaaacacctatagaacctgtaatcgtattgctttctgcaaaaattttgttggcgttgcaggcaatgtagtaaccgcccgatgcggcataattccccatagaaaccacaaccggttttacttttttggttatctcgatttctctccagatcaggtcagaagtcaaagcacttcctcccggactgtctattcttagcacgattgcttttacgtcttcatttttgcgtgcctcctgtaaagaacgtcgcatagaaccttcaccaattacggtaacatctccttcgccgccttgtatttcaccctgtgcataaataatagcaatttggtcagtagcagtattggtcagggcagttgtaatgttgttttgagtataatctaaaatcgaaattttattgtaatcgtcatcacccgttacttttagcgcttttttgatcgcgttatggtacacatcttcataggcaataacatctatcagattttgtgcttttgccatttccggagttctggccagtaatccattggcgatttcatttagtttcggtagcggaatatttctgctttttgaaatatcagtcgtaaccgtagtccagatggagtttaaaagagcagtaacctgttctctgttggcatcactcattttattttccagaaaaggttcaacagcacttttgtattttccgtgacgaatcacttccatgtgaatgcccgatttttcctgaaaatctttgaagaacatcacctcagacgaaagacctttgaaatctaaatctccggcaggattcaaataaatagtattggctacagaattcagataatattctttttgcgagtacgtattggcatatgcccatacaaactttcctgattttttgaaactttcaagtgcatttctcaaatctttgtattgtgccagacctaaagaagactcatcatttaaaatagagattcctttaatgttatcatcggttttcgccgcttcaatagcattgattacatctgttaagccgatgccttttttatccgaaaaaacagttacccacgggtctttgtattttccggcataatcgttttgaatttgttttaaatttaattcaataacagaatcacttttcacggaaacagcatcgtctcctccaaaaattgctccaataagaatgaccccaaaaaagaagaggataataaatacaaaaataccaataacagtggcaattacatttcctaaaaacttcataagtatatttttttaataagtatctaaaaaggttggtttgttacaaaagtaatctaaaaacaaattaattcgaatatcagatcggatgaaatggttgtagcctctgcatttttagtgcattaaactaaagataagatattttgtaagataaatatagtttgagtccggaataatttatatttgaggaaaccaaatacttaaatatgaaagataaagtaattctgtggagtttttttctctttggcttttatgccggggctcaaaaaatccaaactaaaaaagtggtagtcgataaattgacaaagcttcctctggaaaaagtaaatatttacaatcaaaaggacaattcactaacgaatgaggaaggtgttttttcttttatttccgatcaggatgaattgaattttagtttgattggatatgaaaatctgaaactcagctttgccgaaataaacaaacaggatacgatctttttgcaaagtaaaaccattgaacttgatgaagtagtagtgggagaagaaatggctataatgaaaaaagtatatgccaaaatgaaagagaattacatattcgaaccttacaatgaaaacttcttcttgcgatgtgtcttgaaacgaaatgatgaattagaaagattacaggatatttatggtaaagtatcgagaaaaagcatctttaaaaccaaaacacaacctgacaataaatgtgaagttgagattttgaatatgaggaaagttgggataaaagataaggctgattttgtgtatttcgaatttcagagtttcgaaaaattatttgatataaatgctatgatctctatcaaaacggaagatttcgaacttactaaggaaaaaaatgtagcaggtgatttttttaaaattagttttatcaaaaagtcagaaaatacaattgaacaaaaaaccagtggctattttataattaataagaatgactatgctattgtagaaacctattttgatctttatgataatggagaaaaagtaccatttcaaaaaaaggacaaagtagaatatcgaaccacgagttttaaaaccacttcaaattataagaagagtgccagcaccaataaatattatttgaataacgcaaaatcggatgttagggtagaattacttgtaagtgaaaaaaatataaaagctttttatgattacagtaccaatttttttgtaaccaatagttttattgctgaaaaagcaaagtcgaatttgtcgatggataaggatatttttaaagtgaaatttccttactcagaacaattttggaaaagccagaaccaactacctttaacaagcaatttaagtgcatttttgaagagggtttcagaaaacaaagagaacaagaaagagtttgaaatagttggaaacttctaagtcttgaatcaaataatgtagttaattctaaaatagttttagttaatttgcattaattatgaagtcacagcatcaaatcgttttatcaataggcagcaatcagggaaacaggttaacaaacatcgaaacgtgtatcgatttgatacataaagaagtggggactgtaatcagggtttcaaaactgtatgaaactcctgcctgggggtttgaaagtgatgctttttataattgcgcattggttttgcatacctatttatcggcgcaaaaagtattaagtcaggttctaaaagtagaaaaaaaattaggccgaatcagatctgagcaacaagggtatcagtcccgaattatcgacattgatctgattacttacgatgatgaaactatcgagtccgaaaaattgcagattccacatccgttaatgcaaaacagaaagtttgttttgcttcctatgcaggatttaggtttagactgggaacatcctgtttttcaaaaatccattacagaattaattgcaatctcgcctgacgatagtgtttgtgaagtagttcaggaattgaaaaatccgatacgcgaaattgcattggagaacttcaactacattgctttcgaaggaaatatcggggcagggaaaaccactttggtgcaaaaaatagcggaggattttaatgcaaaaatggttttagaacgttttgctgacaatccttttttgccaaaattttacaaagatcagaacaggtatgcttttccgttggaaatgtcttttctggcagaccgttatcagcagttatcagatgatctggcacaatttgatttgtttaaagattttattgtagccgattatcatatctttaaatccttgatttttgctaaaattacccttgccgaagacgagtatcgattgtatcgaaatttgtttgatattatctataaagaaatgccaaaacctgatttgtatgtttatttgtatcagaattctgaaaggctgctgcaaaacatcaaaaaacgcggacgcaactatgagcagaatattgaggcgggttatcttgataaaattaataatggctatttagaatatattaaatcccaaactgatttaaacgtgctgattattgatgtttccgatcgtgatttcgtgaaaaaccataaagattacctttttatcttggacgaaatccagaagaagatttttaattagataattagataattagacaattatcacattatctaattatcaaattgccacattgcctattttggccagtttaatttctgaaataaatcccaaaccacaattccggcgcttaccgcaatatttaaagagtgtttggtgcctaattgcgggatttcaatacagccgtcgcaaagagcaactgcttcctgagcaactccgtaaacctcattgccaaaaaccaatgcatacttctgatttttctccgttttaaaatcctgaaggaaaatagaactttcaacttgttcgatggcaagcgtcaggatattttcttttttaagattttcgattacttccaatatattttcgtgatgttcccaggccacagtctcagtagcgccaagagccgttttgtggatttctttattgggtggagtggcggtaataccgcacaggattattttttcaattaaaaaagcatcagcggtcctgaacacagatccaatattgtgcagactgcggatatcatctaagactaaaattaaaggagttttgtctgattttttaaaatcctctatcgatttacggtccagttcgctattttcaagttttctcataggtttattcaggtcataaaaaaagcttccaaagttaaggaagctttttgaattattctattttacttttcagattagctttttaccggatctggtaaaacagtacctttaatagtaagcacttttgttggttgtccttcagcattagaagttacagttacagtttttgtaaaagcaccaactctgtcagtagcatattttacaccaataatacctttagcaccaggagcgattggctcttttggagttgttggtactgtacaaccgcaagatccggttgtgtttgtgatgataagaggtttagttccattgtttacaaaaacaaactcacgtttcccatctgcattatgagcaatagttccataatcaatggtttctgtttcgaaagccattcctgcaccttcaactttggcaattttaccttttttagtgctttgagcattagaagctgtaattccaactacagctaacatagcgattaaaattatttttttcatcttttttagagtcttttttaattaacacaaatctatgtaaaattcttatatctcaacttaaaaaaagcttaaaatattttaatttttgcaccacctagatattcctccaaaatgtcataaattcgctgtcttaattttttcatttaaaatacaataatttggcagcgaaagagaaagtggttaaagagacacctttaatgaaacaatacaatgaaatcaagagaaaatatcctgatgcctgtttgctttttagagtaggagacttttatgaaacctttggagaagatgctattagagcctcaaaaattctgggaataacattaaccaaaagaggcgccggttctgatacagaaactgctttggccggttttccgcatcactctgtcaatacctatttgccaaaattagtcaaagccggacttcgtgtggctatctgtgatcagctagaggacccaaaaatgactaaaacgattgtgaaacgcggggtaactgaattagtaactcccggagtttctttaaacgatgaagttttacaatccaaatcaaataactttttagcatcggtttattttgctaacaaaaatatcggagtttcctttctggatgtttctacaggagagtttttaacggctcagggaaatgcagagtacatcgacaaattgctgcaaaacttcaatccgagtgaggttttggttccgaaacaaaataaaagtgactttaaggatgcttttggagatgattttcatagcttttatttagaagactggatttataaggaagattatgctttggaaacgctgacgaaacattttcagacggtttccttaaaaggttttggagtagaagagttaaaagaaggaattattgcttccggagcaattttgtattacctgtcggaaacgcagcataatcgtgtgcagcacatcacggcgattcagcgtattgccgaagatgcttatgtctggatggatcgttttaccatcaggaatttggaattgtaccacagctacaatccaaatgcggtaacccttttggatgtgattgacagaacgctttcgccaatgggaggacgtttgttgaagcgttggctggctttgcctttgaaagacagtgccaggataaaaagtcgtcatgatgtagtttcttatttaaaaaacaattcggaagttttacaaagtattcagtatcagatcaagcaaatttcagatttagaacgtttgatttctaaaatagcaacgggaaaagtttcgccacgtgagattgtatatctgaaagaatcgttggatgcaattattccaattaaaaccctggcacttgaaagtccgcaggaagcggtgaaggtgatcggagacagtctgcatgcctgtgatttgttaagagaaaaaattaaaaatactttaaatcaggatgcgcctgttgcggtggctaaaggaaatgctattgcaaaaggaatcagtgaggaattggacgatttgcgtgctatttctacttccggaaaagaatatctggagggaattgaaaaaagagaatcggagcgtaccggaatctcttcgcttaagatctcgtttaataatgtttttggttactatattgaagttagaaacacgcacaaagataaagttcctgaagagtggattcgcaagcagacattggttaatgcagagcgatatattactgaggaattaaaagaatatgaaactaaaattctgggagcagaagagaagatttacaagatagaaacagagctttttgagcaattggtgatctggattggaacttatatcaagccggtacagatgaatgctaatttggtggcgcagctggactgtttgtgttcgtttacacaattggctatagaaaatcaatatgtgtgtcccgaaattgatgaaacgtttgagttagagatcaaaaacggacgtcatcctgttattgaaaagcaattgccggttggaacgccttatattgctaatgatgtttatttagacagagagacgcagcagttgattatgattaccggtcctaacatgtcgggtaagtctgctattttgagacaaacggctttaattgtattgttggctcaaatgggaagttttgttcctgctgatagtgtgagaatggggattgtagataagatttttaccagagtaggtgcttcggataatatttcgatgggagagtctacttttatggtagagatgaatgagaccgcttctattttgaataatatctcagatcgcagtttggtgcttctggatgaaattggaagaggaaccagcacatatgacgggatttcgattgcctgggcgattgccgaatttttacacgaacacccgggaagacctaaaaccttgtttgcaacgcattatcatgaattgaatgaaatgacagaatcgttgccaagaattcagaattataatgttgcggtaaaagagttaaaagacaatgtgcttttcattcgtaaactggtaaaaggaggaagtgctcatagttttggaattcatgtagcaaaaatggccggaatgcctcagattgtaattttgaaggcgcaaaagatgttgaaaaaactggagaaaaaccactcaagtgaagcgttaaatggtgtgaagtctgagaatgatgaaatgcagatgagcttctttaatttagatgatcctttgctggaagagataaaagaagaaattctggggcttgatattaatgcgatcacaccagttgaagcgttgatgaaacttaatgagattaaaagaatgttggtacgaaaataaatttcatatttaaagtttaggttatcagaaagttataaaataagtggatttttttttcgaaaaacgcttgtgtaattgaataaatgtcctaaatttgcactcgcaatacagaacaaatcaagtgttgcagttcttaattagaatttgaaatgcgaaaatagctcagttggtagagcgcgaccttgccaaggtcgaggtcgcgggttcgagccccgtttttcgctctatatcatctaatgctcggatggtgaaattggtagacacgctggacttaaaatccagtgaacagcaatgttcgtgcgggttcaagtcccgctctgagtactaaagcctcttcttttgaagaggctttttttatggtgtaaatccaggagttctaaaataaatctgcgaagcagatttgttttagagaatctaagaatctaagaatctaagaatctaagatcaaaaatcaacaatctaaaatcaacaatctaaaatctaaaataataatatgggtgcctttgtaattagtaagcgttttaatgatgaatataaattcgtatttacttcgagaaagggcaaggtgatatttacgagtcttagttatgaattgaggtttgagtgcgaagaggatatcgagaagtttaaggtaaatatagagatggctcggtttttaaaatttaaaggggctgggggaaggtatttttttaaattgatgttgggagagcttcatttcgctacaagtcgaaaatatacgacggaattgcttttgcagaaaggaatcaaggaaattgtgacttatgcttcgagagctgagattttggatttttcctcaagtgaatctatttttgaagatgaagttgtgggtgaggaagtagaagtagaggattaggaaataaaagagtgtcttttgttttctgtgagttttggtaattgtatgagagcctggtgagttttgaagacttatcagttttttttttttttttttttttttttttttttttttttttttttttttttttttttttttttttataacgtgtgttatggttagggaaggtgttgtggttttgttgggtatagggcataaaaaaagctatctacagagagatagctttttatttttttgagtaatttagaattactttttagcaggagcagcagcttcttcaacttttgcagcagcagagtcaacttttgcagcagcagaatcaacagttgcagcagcagaatcaactacagcagcagcagaatcaacagcaacagcagtagaatctacagcttcagtagctgcagcgtcagcttttttacaagatacaacagttaaaacagcaacaacagctaaacttaaaaatacttttttcatcttactttattataaaaggttaattattaattcgtggcaaagatataaattttttaatatgtaaaatatttttttattttttttttaaaatattttcattgctcacgattatcttatttatcaaataatgtgccaaattaataaaaatatgttaaattacggtatgttttgtctaaattattttttattgaagattcaataagagaattgggggtttttatcctcttggttgcagtttgttttatcttttttagaatattaggtggtgctgaaaaaaaacaaaagagcttaaatgagcccttttgtgagtaatgttgtttctgaatcacgtacgattcgtataaaaaggttacgcgacgatattcatgatgctgtttgtagctcctttattgttctgaatatacgatttgcaaatttgactcttttcttctaaaaacgctttgtcctgaagcaaacgatcaagattttgctttaattcctgattgttcgagattacaaggcatcccttgagggctaccagttcaattgcttcggcgaaattcgagtagttgggaccaattacaattggaattccaaaagtagccggttctaatatattgtggattccgggatttccaaatccgccgccaacataagcaattgtcccgtaactgtaaattttagtcagcaatccaatagtatctataataaagacattgtaattagataagtcggcattttctttttcggagaataatattgttgatttagtaatttgcgctttcaggcttgcgatctgatcactcttaatgttgtgaggtgcaatgatgaattttacatcttcggatgcctggttgatgtattctgctactaatgcttcatctttaggccaagagctgcctataatgatggttggggtattgtttttgaatttttcgataaaatccaaagtattgtctctttctaaaatagcatttacacgatcaaaacgagtgtctcctgaaacaatcacattgtcaaagccgatactctttattttttcttttgaattttcgttttgaacaaaaaagtaagtgaatgcttttaatgcttttctgtaaaaaccgccgtaccatttaaaaaacatctgattgtctctgaaaattccggaaattaaataggtcggtatttgacttttctctaattcatttaagtaattcagccaaaattcatattttatgaaaaatgccaactcagggtgagctagctttaagaatttcttggcattgcttttagtgtccaatggaaggtacagcgtaacagctgcaacagtattgtttttgcgtacttcataacctgaaggagagaaaaaagtaacgatgattttgtgggaaggatatttttctttgattttttcgattactggcaggccttgttcgtattcgccaagcgaggccgaatgaaaccagatggttttatctgaaggccttatcttttcttcaagaatcgtgaaaacatttttacgaccttcgacaaaaagcttaattttcggactaaaaagtgctacaattttcagaaaaaagccagcaatagaaataactaaattatagagaaaaagcatctgtttgtttttgtggctaaattacggttctttcgattattttcattggtttgaaggtattaaataactatttttgttcctccttttagagacgctgaatgaaatgcaagtctttaattttaaaatatattgaaaatgaaaaaaattcaaatggttgacctaaaaagtcaatacgaaaaaataaaaactacagttgatgcctctattcaggaggttttggataccaatacttacataaacggtcctttagtacaccagtttcaaaaaaatctggaagattatctgggggcaaaacatgtgattccatgtgcaaacggaaccgatgctttgcaaattgccatgatgggattggatttgaaaccgggcgatgaggtaattactgccgattttacttttgcagctacggttgaggtaattgctttgttacaattaacgccggttttagtggatgttgatgtcgtaaatatgaacatcgatattgaagcgctaaaaaaagcgattacaccaaaaacaaaagcaattgttccggtacatttatttggacgtgcagcaaatatggatgctattatggaaattgctgccgaacataatttatatgtaattgaagacaatgcacaggcaattggagcagattatatttctaaatcaggagcaaaaagcaaagtaggggtaattggtcatgtagcggcaacttcattttttccgtctaaaaacttaggctgttatggagatggaggagcaatttttaccaacgacgataaattagcgcatatcattcgcgggatcgtaaatcacggaatgtatgagcgttaccaccatgatgttgtaggagtgaattcacgtttggatagtattcaggccggagttctaaatgcaaaattgccattattggatgagtacaatgcagcacgtcgtttagcggcaacaaaatacaatgcagcttttgccggaaatacacatattattacgccggaatttgatgcaagtcaaaatgatcatgtttttcatcaatatgtattgagaattattgatgcagatcgtaatgctttgatgcagcatttattggataaaggaattccgtgtgcgatttattacccgattccgttgcattcacaaaaagcttatgctgattctcgttacaaagaagagcagtttccagtgaccaaccaattggtaaaagaagtaattgctttgccaatgcatacagaactggatgatgagcaaatcaaatttataaccgattctgttttggaatttttgaataaataataaagattaaaccaaataaacaacagcacaaaataaccgcaaaatgaaagtattagtaacaggaggattaggatttattggttctcacaccgttgtagaattgcaaaatgaaggttttgaagtagtcattattgataacctttcgaattctacagaagacgttttaaaagggattacgaccattacaggaaaaacacctttgttcgaaaaattggatttaagagaaaaagcgtcggtgcgggagttttttaaaaagcataacgatgttaccggagtaattcattttgcagcttcaaaggcagttggtgaaagtgttgaaaatccattgttgtattacgaaaacaacattgcttcattagtgtatttattgcaggaattgcagcaaaaacctgaagcgagttttatttttagctcgtcttgtaccgtttatggtcaggctgaaaaaatgccaattactgaagatgctccggtacaggtggcgatttcgccttacggaaacacgaaacagataggtgaagaaattattactgatacagctaaagtaaccaatatcagtgcaattttattgcgttattttaacccggttggagctcatgcaacgactgagattggcgaattaccaattggtgttcctcaaaatttagtacctttcattacacaaactggcgtaggattgcgtcaggaattatcggtttttggagatgattatccaactcctgatggtacagcagttcgtgattatattcacgtagtagatttggcaaaagcgcacgtaattgccttacaacgtttgttggctaaaaagaatttacaaaaagttgaaactttcaatctaggaaccggaaaaggaagctcggttttagaagtaattcacagtttcgaaaaagtaagcgataaaaaattaccttataagattatgccacgtcgtgaaggtgatattacagaagcttacgcaaatacagataaagcaaataatgttttaggctggaaagcccaattaagtttagacgaagccatggcaagtgcctggaaatgggaacagaaagttcgttcttaatttttttcagacgaaaataaaaacataagaaaaatcccaaataaactaaaaattatttgggatttttatttattggtttactttattttgtaaatttgtaagaataaaatgtaggaattatgaaaaagaaaaatgaaaaacccagagttagtaaggtggaagagcctgctgtagaatatgaagttcaaaaatctaactttaaaggaatagaccgaaaaacttttgattttgataccgagtttgcaaaaggattaacgccggaagaatttaaagccgaaatttttaaaagaatagaggcttattcgtggaaaaaataatatttgaaaaagaagttcttaattcctttgaagatttagtttttgcactttttaaagaggagtattttggttatctggagtcctctcagaattatgtaggcaaaatagttgattttgttatttcaggtatttcaagttttccacataagaaaacaccaaaatcacttcattatttaggttcgtactatgttttttataaagccaatggcaggacaacctggtatatcttctttgataaaaaagatcaaaattatttgattacaggaattataaataattattgtgcagaagcaaaagagctgtaaaaacaaatccttttgaaaagtaagcgataaaaatcccaaatgatctatttagattatttgggatttttatttttggcttaatttatttttataaatttgtaagaataaattgtaggaattatgaaaaagaaaaaagaagaagctagagctagcaaggtggaagagcctgctgtagaatatgaagttcaaaaatctaactttaaaggaatcgatcgggaaacttttgattttgatgccgagtttgcaaaaggattaacgctggaagaagcaaaagcagaatcaatcagaaggattagagaatggtggggaaaatagaagttgtttttacactctcggtgattgtgtatcttgatgatttagttatgacattgtataaaaatgaatactttggttttatagcatctgcagaacaatatgtttctaatatttatcgagcagttcccgaaagaataaaaaattgttcccataagaaagcttcaaaatcacttcaatatttaggttcaaactatgttttttacaaaccgaatgtcaggacaacctggtatatcttctttgatgaaaaagatcaaaattacctcattgcaagaattataaataattattgtgcagaagcaaaagggttataaaaaaaaaatcctcataaacaatcttgttcatgaggatttttttttatgtagtgagtaactgaaaactgttactgagactgaatactaattatgcattcgcagtaaccgcttctttgtcaattttgttgatcaaacctgctaacactttacccggacccacttcagtgaataaagtagcgccgtcagcgatcatttgctgaacagattgtgtccattttaccggagcagtcaattgtatgattaagttctttttgatttcgtttgcatccgaaacagcatttgcggttacgttttggtaaaccggacaaacaggagttgagaatgtagtggcttcaattgcagcagctaattcctctcttgctggttccatcatcggagagtggaatgctcctccaacaggtaaaattaaagcacgttttgcaccggcagctttcatagcttcacaagctttttcaacagccgaagtttctcctgaaattaccaattgtccaggacagttgtaatttgccgcaacaactattccgtcaatagaagcgcaaacttcttctacagtattatcagctaaacctaaaaccgcagccattgttgatggggtgatttcacaagctttttgcatagctaaagcacgttgagaaactaatttaagaccgtcttcaaaagacaaagttccgttggcaaccaaggctgaaaattctcctaaagaatgtcctgcaaccatttctggtttaaaatcgtctcctaaagttttagctaaaataacagagtgtaaaaatactgcaggctgtgtaactttagtttcttttagttcttcggcagtaccttcgaacatgatatctgtaattctaaaacctaaaatttcattagctttttcgaataattctttggctaaagccgatgtttcatataagtccttgcccattcctgtaaattgtgcgccctgacccggaaatacgtatgctttcatttgtctaatttaaagattgaatttttttgaattgaaaattagtttcaattgaaaggcaaaagtagcatttttttacttcgtataatccttaaacatgtaaatccatgctaatctcgaaaatcgaagattgaaagaagtgagtagggtaatgacgacagcgataattggaataatccttaaatcgaaattcttttcgaagaaaaattgtgcaatacagtatgttgcaattccctgagcgactgttaatccgtagtttacatacatagcaccaaagaaataaccaggctctttttgaaacttataattacagtgactgcaaaattcgttcatctttggaaggccaaaagtgaaaaaaatatttttatctgtaaaaacctttcctttatgacaaataggacattcgttgcttaaaatatgagttaatgcacttgacatgatcttgttgttttttatttatacaaaggtaattcagaacaggattaaagtcttttttatatcttcgctacttatagcacaataaagacatttattgtaaaatcgcctgccttaaacgaatttgtaaacgaaaaagaggattgggcaatcgcatatgtgaccaataaaaaataaattctacagatatgaaaaaatacccggtttacagtgttcagaattttagctgtaatgatattcatcgtgatttttatgtcaataccttcaaagagcatttaaaaagtcacagttttgtagaagaaccacaccggcatgattcgtatttgatggtgttttttacgaaaggttcgggacagcacgaaattgattttgatcagtttgaaattaaaaagggaagcctgtttgtgctacagccgggacaaatgcatcattggagcttatccgaagatattgagggttttgtgattattttttcacaggagttgtataatttatatttcggacagaagaatattaacgaatataatttttaccattcgattcacaatcggccggaaatggtttttgaagaaaaaggaatcactaaaatccgaccttattttgatttattaattcaggaaagtattcaggaggggcgatatcaactggataaaatgttgaatttgctggattgtattcatattgaaatagcccgcaaatacaacgaaacctattcacatcaggcgcattcgtataatattaaaattgacaagttcgaaatgcttttggagcactatttcaaacaagaaaaattaccgtctttttatgccgaaaagttaagtattactttaaaacatttgaaccgcatctgcaatgaaattttgcaaaaaacggccacagaagtgattacggatcgtgtgattttggagataaaaagaatgttgattgacaagcatttagcggttaacgaagtagcgtttaaagtaggctacgaagattattcgtatttctccagattctttaaaaaacaaacgggattatcgccaacggaatttaggaataagaagtaaaaaagagttgggcttcggcttcgctcagcccggcacttgagctttaaagttatcaaatgtccggctgagtgaagtcgaagcccttttagccaccaattaaatttaatttaaaatcggattacgcttgttttgcaaactgtaattcaatgtttaattttacttcttctccaaccagaacaccaccggtttcaagagctgagttccagtttagaccccaatctttacggtttatttttccttcgatatttaatccgacttttgtatttccccacggatcagtcatagttccactaaattctaccggaaaagttactgattttgagatacctttgatgtttagatctccggttaattcatagctcccttcatttatttttttgaaagaagaacctttgaaagttagttttggatgattctcagcatcaaagaaatcgccacttcttaagtgattgtctctgtctgtatttgcagtgtcaatagaagtaatgtctcctgaaaattcgattgcagcattctcgaaattgtctccgtctgtattgattgttgcatcgtaagtaccaaatttacctgaaacatttgtaaacatcatatgtttaactttaaaaccaatttctgaatgtgttgggtctattgaccattttgtagttgccataattttatcttttaaataattaatttcattttgataggacaaagttacggtggtagtgagcgtaagggacttaacctagattaagaaataaaaaatgcgatgacttttggagtatcgcatcttttattgttgctctgagagtcccccggttagagggaagagtcttagttttttgctacgcattaaatgattttcatggattaatatatttcaattcagaaaaaatttctttcatctgtggcaagaaaattagcttttgtcattcatgtaaaagcttaatgctcctgacgggcatttgtgaatggttgaaataattttttctgttgtagagcgttcaggaatgatccatggtttttcttttgggtgaaaaacatcgggattgttttttacacaattggcagaatgaatgcatttccgggactgccatacaatggttacttctccattgctatattctttcgtaaggtcatttggattcatgattgaaaatttttgcggttaattttagttttaaattcagaccaattttctattaataaatttaatacttctttttggtttttttgtgctttgagaaaaaaaaagaaacgataacgtactgtgattcagtataattatcgcttcttttgaaatgtatgtgaagtgtcttacaaattaataattcataggaacttccattagcaggaattcggcctcagtgttggctttgatgtttaaagtttcaaaatcagagattcccatagcatcacgagtgttcaattcctgaccgtttatcgttacatttccttttaagataaaaacgtagactccgtttccttctttttttaatttataggttgtagcgatgccggaatcgaaattccccatatgaaaccaggcgtcctgatggatccaaactccttcatcatcagcatttggagataaaacctgagacagtttgttgtgtctgtcggcaacatctaaagtgatttgttggtaacgcggcgttacatttctttggttaggaaacaaccagatttgtaacagcttcgtttgctgatcggcatttgggttaaactcactatgttggattccggttccggcactcatcacctgaatgtcaccatttttaatgatttcggtattccccatactgtctttgtgtgctaaatcaccttctaacggaatggtaatgatttccatattatcgtgaggatgagttccaaaacccattccgcccgcaatagtatcgtcatttagaactcgaagcgctccaaactgaattctttccggattgtaccagctcgcaaagctaaaactgtgataggcattaagccatccgtgatttgcgtttcctcttgtttctgctttgtgtattactatattttccatgatgataattgttttgttattttttatagtacaaatttacgatcaacatgcctgaaaagcacttaatgtagattaagaaaaaggggctgaggttctgagttgctgaggtttttaggtgcaaaggctcagagttgcaaaggtacagaggcttttgcagcgattgagatgggctggatttcatgtttacgatctaagcaatctaataatccaataatccagcaatccaaagatctaagaagtctaacaatctaaacagtctaataatccaataatccagcaatccagcaatccaataatccagcaatccaataatccagcaatccaataatccagcaatccaataatctaacaatccaaagatctaagaagtctaacaatctaaacagtctaataattcaataatccagcaatccaataatctaataatctaataatccaaagatctaagaagtctaacgatctaagaagtctaacaatctaaaaaagactagctgtattgcgcaataaactgttgcacaacagtatccgtattctcgtggcgttttttcttttccaatgcgataggcggagcggctctttcaaggcagtcttttacgtcgcaggtttcgcaggtgacccctacaattcgtttgacaagcggttttccttcaatgaacttgaatttctttttcatggttggattgattaaaataccaaccgaaatacttcttatgttgtctttgatgaaaggatcttttgtggctgatgaaaaaaccaggtattcatttccactatggacataacttgaggtctgagcatcaaaaaaatgtggtttgttctgtttgattgcttcgtctatggtttttaccgaaacccatcttctgcaatagtgctcgttggtttcgtttgcatgtggttcctgctgattggtgatgtgcagttctttcttgatttgataaacgtcagaaccaattttatgtgacattcttaaaaagaataagttcttcagatggaaatctttagggagtaaattagttaatctttgataaaaagattccggcgaaacttcaaaactttcgatcagcgttacaaattcttccggatttggcttttcgttatttaaaaagtcattgattttacctacgatcaattgtctcggtaataataaagcgcctgcaaagtaagaagcatagaaattatgcaatacctggtcaaagttttcaaacttgatccagctgaacgtcagtaagcgatcggatagattgaggtaattgtaagcaatttctttggccagaatgaaagctttctgcggatcgtcgatttctgttgaaagtaagagggttttgctttttgggacatagatagagcgcagatcttctaaggcttcctgatccgtgaaggcaatttctttgatagtgtagtcaaattcctcttttagaatggcttcgagttccttaatagtgatttttgaatctaaattaatctgaaaggacttagaaaaagcaattactttatcttccagatcttcaaaataattactgtgtgcttcctgatacgatcgtaaggcggcgaggaaaaaactctccctgctcagattgtaatgctgggcaatttcaataatggtgctgataaacgcattgactttggcgggggcattggcaataatgtcgattaggtccgcttcctgaatgccaaaaagctccagaggaatctcttttaaaattcctgattttaagatttctccaatcggagcgaggttgttgtccagttttaaagaaaccatttggtcgtacgtaacatccaaatgttcgcataaaagcaaaattttatctgtttttggatatttctttcctttttcaatctcgttcaaatacgattttgaaagattggtcagtttagccaaaccaaaaagagagaggtttttctgagtgcgaacctgcttgagttttagcccaaaaatcagctttatatagtctttttcgatatccataatatcaaatgtaagtaatctaaaaataatcgccaaaaaagttttttgtaaatttagcgaacgttcgcttgttttgtaaaaaacttttttctaatattgtggtgtagaaaatattaacggtcagattgttataggagaaaagatcttttattagcaaaaaatgacgaataatggagaactaatcaaaagcaacaacgatgaaaaaccaattagagattaccgagacggctatggagtttttggccgaaaagaagctttcttatccaaagatctggacagaagaggcaattgtttttataaccgaactgcatcgaaaattcgattcacaacgaaaattattgttactgcaacgcgaacaaaaacaaaccgcttttgatcagggcgtcatgccgtcttttccttccgaaacaaaaaccgtcagagaaagtaattgggtggcaggagaaactccaaaagatttacaggatcgtagagttgagattacgggaccggttgatcgcaaaatgattatcaatgcgttgaattcaggagcgaaaacttttatggcagattttgaagacagtacttctccgacctggcaaaatttaatggacggacaagtgaatttgattgatgcggttaacaagacgatttcttataccgatttgattaagcataaatcgtatcacctgaatgaaaagattgcgacattaatcgtgcgtccacgtggattgcatttaccagaaaaacatctttcgattgatggaaatgcggtttcaggttctttggtagactttggtttgtatgtttttcataatcataagagacttttagaaaataactcaggaccttatttttatattccaaaattggaacattatctggaagcgcgctggtggaatactgtaattgattttaccgaagattatttgaagttagaaagaggaacgataaaggttactgttttaattgaaactataacagcaagttttcagctggacgaaattatttttgaattgaaggatcatattgttggattgaactgcgggcgttgggattatattttctcttacattaaaaaattccgcaagcattcaaagtttattgttccggaccgcgatcaggtcaatatgacttcgccttttatgaacgcttactcgaatctggtaattcaaaggtgtcataaacgaggtattcatgctatcggagggatggctgctcaaattccgattaaaaataatgaggaggcaaatgcaattgctttcgcaaaggtaaaaaccgataaagaacgtgaagtaaagaatggtcacgatggaacgtgggtagcgcatccggatttggttgctctggctaaaaatgttttcgatgccggaatgccaactcccaatcaaattcatgttaaaaaagaatatcgcaaaataacagaagccgatttgatagagccgccaattggaattataacagaaaatggggttcgcaaaaacattaatgttggggttttgtatttggcttcatggctaaacggacaaggtgccgcagccttgcacaatctgatggaggatgctgctacggccgagatttcaagatcgcaattgtggcagtggcttcagaataaggtgactttggataacggacaaatactgaatctggcgtattatcatgagttggctttagaggaattcaaaaaaattaaagacgagctgggagaggaaaattacgaaaaccgtcaattcccgttagcggagaaagttttggaaagactggttgtaaatcccgatttcgttgattttttaacccttccatgttacaaatatttataaaaaacgttgcgctgatcattaaaaatcggcgtgaaaaataaaccttttacaagtcacagtcagaactgtgaactgcgactgcaaactatttacttactaaccaacttaacttatatttttatgaaaacaacagaagacagaattcaggaattgattaacgattggatcacaaacccaagatggaaaggtgttgaacgtccgtatactgctactgaggtggtgacgcttcagggctcttatcatattgagcattctattgctaaaatgggggcggagaaattatggagaaagttaaaaagtcaggattatgttgctggtttaggtgctttaacaggaaatcaggcgattcaggaagtcgatgctggtttagaagcgatttatttgagtggctggcaagtggctgccgatgcaaatctggcaggagaaatgtatcctgaccaatcgctttatccggtgaatagcgtgccgatggtggtaaaaaaaattaatagtgccttgttgagagctgatcagattcaggtggtaaaccaggttgaagataaaaaagattatttggttccgattgtagccgatgcagaagccggttttggcggaaatttaaacgctttcgaattgatgaaatcgatgattgaagcgggtgcttctggtgttcattttgaagatcagttgagttctgctaaaaaatgcggacatttaggcggaaaagttttggtgcctactcaggaagcgattaacaaattgatcgcagctcgtttggctgctgatgttatgggcgtttcgacattaattgtagccagaacagatgcggatgcagctaatttgctaaccagtgatgctgatccgagagatgcaaaatttattaccggagaaaagaccaatgagggttttttctatgtaaacagcggaatcgatcagggaattgcaagaggattaagttatgcgccttatgctgatttgatttggatggaaaccagtaatcctgatttggtttatgcgaagaagtttgcggatgcaatgaaaaaagagtttccgggtaaaatgctggcatataattgttctccgtctttcaactgggctgctaaattatcagtagcagaaatggaaactttcagagaagatctggcggctatggggtataaatttcagttcattaccttggcaggattccatgctttaaataccagtatgttcgaattgtctaaagcctataaagaacgtggtatggcaggatattctgaattgcaggaaagagaatttgctttgcaacaaaacggattcagagcagtaaaacatcaggcttttgttgggacttcttattttgatgcggttcaaaatacggtaacgataggaaggtcttccactacagcaatgaaacattcaacagaggttgagcagttttaattctttgtttttaccattaagatattaagaaagttaagctttatgttcttaaaaaaataagaaagattaagtctagcttaatgtatcttaatatcttaatggtttaattttacttttttaaaagcctggctttcattttgctgaaaaattcaggtgttacaccaataaaagaagcaatttgcttttgagggactttatgaaccaatgtgccgtatttagcacaaaatttttcaaagcgttcttctgccgtcagacttaaattatccattaagcgttgttggttggcaaccagagaattttcaattaaaattctgaaaaaacgttctaatttaggaatgtcgagatacaattgctcctgattttctttggataaagaaacgacttctgcctcttctaaaacttctataaaaagttctcccggtttctgtgaaaaatagctgtacatgtcactcatccaccagccctgacaagcaaatgccagaacatgctcgacaatattatcattgatgttgaagcttcttagaattcccgaatttacaaaatacgaatgggtgcaaacttcgccggcattcagtaaaatggtttttgtcttgtaaaaatgggtttccgttttggataaaaaatgagcctgctcttcaggagtcaatgaaatgtgtttggctatattttcaagaattaatgccattatttttcttttatcagcttgaaagagtttgctttaaagcgatcattctctatttttccgacaactgaagctttgcgaacagcattacagaaaccatcttcggcatgtgcatcaccatgttcgtcaattgttgttccgtctacaaaataagtcttgccgtcaatgcgaacggctaaatcacagcttttgcctttcattccaaattgacattcgccacaagcggtttctacgattacaggtttttcatttgttttcttatcctgagcctgagttgaaattccggcaagcaggaacagtgcaaataatgcgtttttcattttttaagagtttacggttattagttttgaagttgttttggcacgttctgtgatttcgtcgattggcgttgtgagagagtcatgacttaaaacaactcccattcggcggtaaggtcttgaagttggctttccgaaaattctgaaatcagttttaggtaaagcggctactttttcaattccggtaaaagttggatttgtcgagtcttgtgaggccagaatcacggcacttgcaccggctttttcaagagtaatttcgaagattggcaagcttaaaatagctcgtaaatgcaattcgaattcattaaaattttgtgttccggcaagagttaccattccggtatcgtgtgggcgtggggagagttctgagaaataaacaccctcgttggttaagaaaaattcaacaccaaaaaggcctgctcctcccagggcttcggtaattttttcggccatgtcctgcgcttcgtatagatcggcatcagaaatttttgcaggctgccagctctcctggtaatcaccgcgttcctggcggtgtccgattggagcgcaaaaaagtgttggattgttattttgagtaatggttaaaagtgtaatctcagaattgaaatctacaaaagcttccacgataacttcgatgacatcaccacgtgagcctgcaacggcatattgccaggctttttcaatatcgccttccgttttgattgtagattgtccttttccggaagaagacattaaaggttttactacgcagggaattccaacttcctgaacggctttttgaagttcttctgccgaagttgcatattggtattttgcggtttttaatcccagttcttttgatgccaggtcccgaatcgcttttcgattcatggtaaagttggctgctttcgcagatggaacaacggtaatgccttgtttttcgtaatcgtaaaaacgttctgttcggatagcttctatttcaggaacgataaagtcgggctggtgtttggctacgattcggtccagtgcttcgccgtcgagcatgttgatgacttcaaagctgtgtgctacctgcatagcaggagcattttcgtaattatcgacagcaattacagtttgtccgattcgttgagcggcaatgacaaattctttgcccagttcacccgaaccaaggagtagtattttcattttggattaattgtgttgttggagaagtaaaagtagcgaaaaaagagtttaaccgcaaagttcgcaaagaattacgcaaagagcgctaagtttttgtcttttagataaagcaaccgtgtagtttgtcatttcgatccaagggaaaaatcacactcgtaatttgataaagattgacgacaattgggtttgagtttcttgtgtgatttctccttatgtctaaatgataaaacggagaaataacggggtgaatttaaccataaaatccgcagggaattacgctaagaacgcaaagcttttgatattcagtaaaaagaaaaggttcgcaaagattaatgaatctttgcgaaccttagtgtatatctttgcgttctttgcggttaaaattctaatgaaaatgatcttcttctatttcgaattctgcatctttttcccagatttccatttcacaaggtttgcagttgaatttcagtttgtattctaattcgccttgttttaaaaccaggggttcttttaccttaacacctgcgatatctttttggtgtatcggacattttttcaattcgtatttgatgcaatatttagtggtcatcacacgtgattttcccggatcccattgtagttcgaatgctttttcaatttcggtaacaccatggcgctcgtagaatttacgggccgttttgttggaaacattatacatgaaatccaatttagtttccggatacggatgagatgttttaacgagttggtgttcttcacgtttgtaattggccagacgaatttcagtcaactgatcgtaaacagttcttctcatttcattgatttttgaaataggaaggaaccagttttgagaaaacataatattgatttcatcggcggtgtaaggcgtaaaacctgttttagccaattgagttttaatgttttcttcgatagattcacccgttttagtttgctctttcgcatgttccaagctaacagtgcttacattaccgtcttcatcagtagcgattaattcgaaacctgttgcggtttctgtaagtaataaagtagtgctcaatttacgaacagcactatcctctctctcaacaattttgatgaaagcggcatcgttgttacggtaaataaaagttccgtcttttacttcttttaaaacgtttggataaattttcccgttttcggctttgtttacatagattccgtcagcttcattgttttcgttgatgaaacaaagtccgtcaccgttgtttagtaattcgccgttttcgatttcgtaagcgtttccaactgttcggattaatttaccgatatattggccttttgattttgggctttcccaggaaccaatggaactgtgtctttcgtttacgaaataatccgtataaccacggttgaaagttctgcttaaagaagaatcaaaagtataggtacatgttcctgaagaggctttcatgtacttatcacttcctacgccttctaaatagctgtctagtttttgacgtaaataagaaacgttgtttttaacgtaaaccacatcttttaaacggccttcgattttgaaagaaacgattccggcttcaattagattcggaatctgatctgaaatgtctaaatctttgatcgaaagcaagtgactgtttctgattagggtttctccgtttccgtcaattaagttgtagggtaaacggcagttttgtgcgcaggaaccgcgattggcactgcgttctccgttggctacactcatgtaacagtttccgctaaaggatacacataatgcaccggttacgaaaaattctaattcaacatcagcttcgtcgtatatcgttttaatttgatgtaagttcaattcgcgggctaaaaccacacgtttgattccagcatctttaaggaatttaattttatcggcatcacgattattggcttgtgtactggcatgaagtacgataggaggtaagtccatttccatgatcgccatgtcctgaataatcagggcatcaacaccaatgtcgtacaattcccaaatcattttgcgacaggtttcgagttcgttatcgtacaaaatggtattcataactacaaaaacctgtgcattaaaaaggtgtgcatattgtaccaatgctgctacatcttcgatagaattgttggcatttgagcgtgctccaaattgcggtgcaccaatataaacagcatcggcaccactgtttatggcggccattcctccaattaaatccctggcaggagctaatatttcaatcttcttcttcattttaagtactttaggcttttgtggtattcacgcaaaaaagtttgcaaagttcttataaatatttcgagtttgctaatgctgaggtgttttttttggaattgttaacttatatggaatgatgatgattaaggttgttgtttttatttgttttcagatgattttaatctgttcattacttgtttggaactaaaaaaaatcaccggatggtttttaataagtaaccttttgaactaagatactttttgatttattaatctaaagggaaagtatatcctaagcctaatatcgcagacgattgcttagctgctgggtgaaagtatcccgaaattgcaatttcaaaattattttttcggccaatggctaatccaagactaaagggaatgtgtaataacatgtcgcttttgttgaaattaacccctggtgtaaaggtttcaaatttacctatcgaagtaccaattcccccttcaataaaaggggctacccaaggaattggtgcacacagacgtacttttgttccgactaaaaaagcattggttgttactttgtattgcggttgattttgtaaattctgatttttatcaactgatgtaaatatagctcctgcatatggacgtatactaaaccatgattttactccaatgatatattctccctgtaaataaaaacctcctcccataacatcgacttcctcttgattaccatagttttcaatataataagagctgcttgaggcaaagcctatagaacctttaatggcattacctgttgcttgggattttgcctcattgttaaaaaataaactaaggattgtaattaagaaagaattgcgtaatgttagattcataaaatattttttggttggcgcgaaaataataaaatatttttaaattctgataaaccaagaactacttggtttactgactaagtggttttctttctcgaaagggaagtttcaaatattaagataatttttttgctttaattgtagtcaaagtacttttgctagtagttagttataagtacttaattagttttatcttttttaatgcccatagctaatgactcgggtaattttccagcctataggggtgtttttccagatatgagtaaatttataggtaccacagttgatgagctctcccttttcaagtcggcagaatttatgcaatccggtttgtatggctccataatctttaatggggtaaacttcaatgcttccttctaccagaactcttcttgtgtatccgtaattggtgaaaattcgtcggaagttttccattgtttttgtatagtcgtctagtcctcccgtatcatgaaagaattcaaggtcttctgcgaataaagtttttaatttttctaaatcacctttgttagcagcttcaaaaacaactccgtccatttttacaatggtatcaaatagttctttagatatcggtgtatagggttttgattcggttatggttatttttttggttacagtacaggatgttatgaacattcctattgtgagcaataatacgattgtagcaattatatttttcatgtttattgtttttaaggagaaccttgtaaaaaacagattcaataatttttttattgatttgttaaaaatactaataaaatgatttaaaaatatggggttgttaggggagtgctaaaatgtaatttgttctgctgcagcttattttttgggttagggataggagcgatatccttttgcttttttctttaaaaagcaaaagatacagcgaatagcccggttcgccgcggcgaaatcccccgtaaattctaaaaatatactttctgtaacctttagcagatagaagtcgtcaaagcttttatcaatcagactaaataatcacaaaatgaaagccttcttaaaatcgtttattgttctgtttctaattatctgttcgggactgtcggctcagagtttagaaacccaaatagataatttaattgcctcaaagtttcaacctgaaaatcccggggctgtttttctggcggttaagaaaggaaaagtagtgtatcgaaaagcttttggaatggccaatttagaaatgaatgttcaaatgaaacccgagtctgtttttgaaatcggatccatgaccaaacaatttacggcagttgctgttttgatgctggcagagcaggggaagcttaaacttgatgatgaaatcacgaagtttattccagattatccaacaagtgggaataagattacggtacatcatttactaacgcatacttcaggaattaaagattttacgagtatgaaagctataaaagatattgccagacaagatttgtctccaaaagaactggtagatttttttaaaaatgaacccatcgattttaagccgggtgaaaaatataaatattgtaattcgggatatgtgcttttggggtatatcattgaaatggtttccggacagacttatgaagcctttataacacagcatatttttaagaaaaccagaatggaaaatacctattacgcgagccatgataaaatgattaaaaacagggtttcgggttatcgagagagggatggttttattaatgccaattatatcagcttctctattccgtatgcttcgggttcgatactatcaaatgttgatgatctgttgaaatggcaatatgcaataaatgcgaataccttattaaatcccgcttctacaaagaaagcatttgtaaattataagctaaatgatggaacaaatattgattatggatatggctggcatttagaaaaagtaaaggataaaattgttcgcgagcatgggggaagtatttttggctttaaatcgatgggggtttatgaaccgacagaacaggtttatgtagtaggattaagtaattgcgattgtaattcgccgactggaattacaaaagagattgcttcgcttttaatcgattagataaaaaaagggtgttttcgaaagaaaacacccttttggttattgtttgtaagtcgttacacagtcaaagcttctttgattctgcgtaatgcttcttttaagatatcgtcgcttgtagcataagagaaacggatacaatttgggtttccaaaggcatcaccagttaccgttgctacgttggcctctcctaaaagatacatcgaaagatcgtttgcatctttaatttcagttcctcttaatgtttttccgaagaaagaagaaacgtcagggaaaacataaaaagctccttccggaacgttgatttttacaccaggaatttctttaagtaatccaacaactaaatctctgcgagtatggaaagcctgaaccatgtggtttaatacactcggatcggcttctacagctgtaattgtggcacgttgtgctacagaatttgctccggaagttacttgtccctggatttttacacacgcttttgcgatgaattcaggagctccgatataaccaattctgtatcctgtcatagcaaatgcttttgcaactccgtttacagtgatcgttttttctaacattcccggaattgatccgatgctgcagaaagtccctgagaaattgatgtgctcataaatttcgtctgaaactacataaatatttggatgtttttccaacacttttgcaagcgctgtcaattcttctctgctgtatacagatccggatgggttgcaaggagaagagaaccacatcatttttgtttttggtgtgatggcagcttctaattgctcaggcgtcattttgaaatccgtatctacagaagtaggaacttcaaccggaactccgcctgaaagttttacgatttcaaagtaagaaacccagtaaggtgccggtaaaataacctcgtcaccatcgtttaacattacttgggcaatattgtataaagattgttttgcacctgtagaaaccacaatttgagatggtttgtattctaatgcattgtctcttttaaattttttgcagattgcttctctcaattctaaataaccttctaccggagaataagtactgtagttttcgtctactgcttttttaactgcttctttaatgaaatccggcgtattgaaatccggttctcctaaacttaaactgataatgtcttttccctgtgcttttaattcgcgtgctaaagcagccattgctaaagtttgtgatgtcgctaagttgttgattctgtctgaaagaatatgattcattataaaatttttgaatgtctttaatttcaactttaattaaagacggttaatgattaatagtttcttattttatgctagctcgggttttattccaagatctcttaagtgtctgtaatgtgctaatacagctcctctcatcgttttgaattcatgataaggcaagttgcattcgatggcagtttgttttacaatttcggcaatttttccgtagtggatatgactgatatttggaaaaatgtggtgttcaatttgatggtttaaacctcctgtgaaccagttgattattttgttttttggtgcaaaattagcagtggtatacaattggtgaatggcccaggtgttttccatttccccttcttcattcggaaccggatttgaagtttcttctactacgtgtgccaattgaaaaacgatacttaaaattaatccggcagtataatgcataacgaaaaatccgatcacaactttccaccatattacacctaaaatcattggtaaagccatccagattaaaacatagatgatttttgtgattacaagaacggtccataatttagttggactttgtggtgctccgtaggataattttcttttcaggtaatttttcatttgcttgaaatcggttgttagagcccaattaaaagtcaaaagtccgtataagaaaaaagaatagtaatgttggaatttgtgaaaacggtgccattctgcattttgggtaaaacgaatgattcttccggcatcaagatcttcatcatgaccgtgaatgttcgtataggtatggtgaagtacattatgttgtacctgccagttgtgaacgtttccggctaatacgtaaatacttccccccatgattttgttgatccatgatttagaagagtacgacccgtgatttccatcatgcatgacattcataccaattccggccataccaactcccataaggatatttaggagtaattgtgcccagaaaggcatgttaagcgttaatattaagaagtatggtgttaagaaaacagcgaaaagaataatggcttttaaatgcagcttccagtttcctgttttctgaatattgttctctttgaagtaattgtttactcgtgagttaagcgttctgaagaacttcagattgtcttgcttcgcaaatgtaggcgcagtgttattcataattaatttaaataggtttcaaaggtaattattataaattttcaatttgcaaaattgagttaaatatttcaatcgtaaagtactacttttgttaaaaaaattagagcaatggatgagatattgaaatattttccggatttgactgaacttcaaatccagcaatttcaaaagttagactttttataccacgattggaatgaaaaaatcaatgttatttcaagaaaagatattgatgctttatatacaaaacacattttgcactcgcttggaattgctaaaattatgaagtttgaaccgggggcaacggttttggatgtgggtaccggaggtgggtttcccggaattccgttggccattctttttcctgaaacccgtttttatctgatcgatgtgatagcaaaaaaaattaaggtggttcagggagttgtagatgcgttagaattgaaaaatgttaaagcagaacaaaagcgtgctgaattggtgaaaggtgattttgattttattgtaagtcgcgcagtaaccaatatgccggattttgtttcttgggtaaaaggtaaaataaagaagcagcataagcacactttgaaaaatggaattctatatttaaagggaggagacttaacagaagaattggcagcttttccaaaagctactttatatgatttgtcgactatttttgaagacgagttctttgaaactaaaaaggtagtccatttgcctttaaagttcactgtttagaagctataaaataaaacccaataatgcttgtctgttttcagagcattattgggttttgcatttaaaatagtattagtaaatcataattaggaaactttttgtgatagttgcaggaacggattacttttttgatctgaattttggatgtatttattcaccgctttttctgatgccatgatggtatagcgaaatttaggattaaagaaaaaatctcggcagattactgattcgttatgggaatcgtataccttttcatccgtttcatcaagatcttcatttgtatacggacacggatacagataagttaattgtataagaatattgttgaaccaattgtcaaatttttttctcttaggcgttatatgacgggcaagcagtaccagtcctgtaatttcattttgtaaaaagtaagacccttttctatatcttacatcgatcattctcacggtcatatgtgccacccataatggcccatctataggccctgaagccggaatgtcaaaattagggtcaaataataaaggacttgataactccggatctttaattgaacaccaaagtgcttcgatgcgtttttcggtatcagtgatacttgtattatggcctataaaacgccagtagatccattccagtaaagcagcgctaagtcctaccgttgctttatgattaatatttaacaatgcagtttcgagttctttgtattcatccagaggatctaagaacttttccatcttctttttattccatttgaaatcaattggatgcccaatgtgttttgagtttagaataatctgcggagcatttttcaagcttttcataagtcaattgttgattttttagttgattcctttgttgaaactggattgtatagtaattgtttatgaagtttatttctcgtttttttgaggttaaaatttatgttttttcttggggttatactgcaaatttatattggttttttctcttttaatgtaacgataggatatataaataacatgataagacaaagttgtaatttggaatgattctaaatatgaatgaaggaagaaacgtattttcgtcattaatcattgattgtttttgtaggtaaaaacatctatttttataaggttttaaaagacagatacaactagggttgatttaagatccggttttagtctgttttatgtgttaattcaggaaagaacgtcattcgtccgcagttatctttcgcttatgtacttttatttgctcaatctccgttagtggaatatctttactacagcataacagtttttgacttgagaatgatggtaaaattatctgcatattggaaaattcagctcattggatggatggtaacctccttgtattgggggatttcagctttttttggaagcagttttatgtggacaattgggatagctgattttgtgttagatgtgtttatcggtatttcattaacgcatctttacagaaattttgctttgataagaggttggaataagttcagtctgaaaaaattggttccaagaatagtgttgagtgttcttatactttctgtgttgtacatgcttttgattgtggggaaactttaccttgttcggctatttgttttaaaaagcacatcaatttcatttatttcgtttttacaatccacgcagttgcaggtttttattacaggtaccagactaatgtctatttgggtgctggcctatcatctgtatcattattcaagattagagattgaaaccgtaaaagaaaatgccagattgtctattatattaaaagaagcacaattgaataatctgagtacacagcttaatccgcatttcttttttaattcactgaacagtattaagtttttggtgttagaagatccgcattcagcgcgacgggcgattgaccttttatctgatctgcttcggaattctttaaacaataatataggaaatttagtagccttaaacgatgaaatcagtctggttagggattatttggagctggaaaaaattcgatttgaagaacgtctacaggtggaaattgaagtagatcaaaagctgtctgatcatttagttttacctttaagtattcagacactggtggagaatgcgataaaacatggaattgaaaaaagaaaagaaggaggagctgttaccgtaaaaatagagcaggcgggcaattttataaaaatcagtgttcaaaattcggggaagcttcataaagagattaaagatttttcaggtattggattgggtaatctgaaagagagattgctgttgcaatacaaaggaagagcttcttttgaaattaaagaaatgcaagacgaaactgttttggcaactattttattcccatcagaatgagaaagataaaagttataatagtagacgatgaacgtttgtccagagaagaactaaaaagggcactaaaaccgcatgaagattttgttcttgtaggagaagcaggaaatgctgatgaagccaaaagtctgattgaagccaaaatgccggatctgatctttttggacattcagatgcctgaaaaatccggtttcgatttactggaatctctcgataatgcaccggcagtactttttacaacagcttataatgaatatgctgtgcgggcttttgaagtaaatgctttagattatttaatgaaaccgattagggaagaacgttttgcaaaagcaatcgataaaataagaaatactttatccggaaagtattctttgggagatgttgcagtaaaagaccgtaagattttcattaaagatggagagaaaagattctttattcagttggatgaaatttatcggatcgaatctcttgaaaattacaccagacttttttttcaggataaaaaagctcttcaaagacgttccctccgccaatgggaagaaatgctggatgcgaatgttttttttagaataaacagaaccgaaattatcaaccttaatcacattcgggaagttaacagaaccgttagcggcaaactggaagtaaagttaaaaacgggagaactcttagaagtttcaaaccgtcaggccgtgaaatttaaaaatcttaatgggatttaacttaaaaaaactgttggatgtaattattttttaacacatagaaacataaaagtaacattctcaaaaaaggcgtttcacttatttaaaacacacagaggtagcctatgtgtaagaaacatgtttttatgtgttaaatgatttaatttattaattacaccgaacgggtttaaaaagagatgtccgttctttttaaatcgctttaacaaaaagaagaagtcataaaaaatcaggccgtttttaaatttattaaaaacagtcggacgcagtgtgttgtatttggaataaagctccggaaaataaattcagataccgcatgattacttcttttttcaatcattttaaaattttaataaaaccatttaaacaaaataacacaatgaaattaattctaagttttgtattttttgtctgttcggtaatccagacattttcgcagcagactatggcgacgagatcaaaagatcaggaaagcgcttatgacattcaggatagtgtgatgattaaaaccagagacggtgctttaatatcagcaatcgttgtttggaaaaagggagatttaactcccaagccggttatctatcagcataccatttatgccagagaaaaaggcagagatctcaaatctttaaaaacagcggcagataaggattatataggagtcatgtcgtattcacgcgggaaacgatttagtcctgacgaaataatgccttatgaaaacgagactaatgatacttatgatgttatcgactggattagtaaacaggagtggtgcaacggaagcgtcgggatgtatggcggaagttataacgggtttacgcaatgggcagcgtgtaaaaaaatgcatcctgcacttaaaacgatagttccgtatgttgcttccagaccgggaatgggtttgcctatggaaaataacgtttttataaatcctaattacgaatggacgttttatgttggaaataacaaatatctggatacggttgcgggaaatgacagacagcgcttcaggaatatgcagtttaagtggtgggaaaccggtgtggcttacaaaaaaatggatagcattgacggtagtccgaaccagtcctttcaaaagtggatcaaacacccgtcatttgacgaatactggcagaaaatggcaccgtacgaaaaagattttgcgcagatcaatattccggttttagccattgacggttactataatgattctcaaaattcagggttgtattatttgagagaattggagaaatacaatcctaaagctaacacttatttaatcattggtccgtatggtcattttggtgcgcaagtaggaggtgatgctgttctgaacggttacaaagtagatgaggtggctctaatcaatacctataaaataacctatcaatggtttgattatattttgaaaggcaaacccaaaccggcaatcttaaaagacagagtcaattatgaggtaatgggggctaatgaatggagaagcgctccgtctattgctaaaatgagtaatagtgtgttaacgttgtatcttgctaatgatccggtagagaaaggaaaattttactcgttgaatgccacaaaaccggttaagaaaagttatttgccgcaggaagttgattttgcagaccgacaaaccattaataacgattattatcccgatcctattattgataacgaagtagacacgtccaatggttatgtttttataagcgaaccttttagtcagccgatagtggtaaatggggcattttttggggagataaaagcgagtatcaataaaaaagatatggatattggagttaccttgtttgaagtaacgccagatgggaaatattttgagctgtcttattttataggcagggcaagttatgcgaaggatattacaaaaagaaatttgcttcagcccaataaaatagaaagtattcctttttcaaatactcgtgtggtgagcaaacaactgagtaaaggaagtagattgttgattactttgaatgtaaacaaaaactcattttcggaattgaattatggaacggggaaggaggtcagcagcgagactattaaagatgctaaagtgcctctgaaaatcaaatggtacaatgatagttttgtaaaaattccggtttggaaataaaactaaaaattccaatcttattcattttaagattggtttttttatttcagtaaagcggtatctaaatgatgtaaccagttttctttatagctatttcctattggtatttcgaccgtatttatttcaacttcattcttagaataagcggttagttttttgatctgaatgatataagagcggtgaacacggacaaaattagcatctaattgtttctcaaaaacagaaatattctgcttaatatgatgtgattttccgttttcgagatgaatggtaatataatcttttaggctttcaacaaataagatatcatcaaatataattttaatatttctgcttccgctggttacaaaaatatgattttcagagtctgattttgtttcctttttcaaaggctgtacttgtttgaatttttctatcgagacaaaaaaacggtcaaaagttataggttttaagagataatcaatgacattaagttcataaccttctatggcatattcccgataagcagtcgtgaaaattaccttaggcggattttttaatttctttaaaaattcattgccttttaagagtggcatttctatatccagaaaaattaaatcgactgtgtttgtttctaaaaaagtataagctttaagtgcattttcgaaagaatcgataagttcgaaattttcaaaattcactaaatgagaagcaattaattctcttgccaaaggttcgtcgtcaatgatgatgcatttgtatttcattcaaaaaaagaatattttttagaaaatctaagttaagggttttgagtcagttttggttatagctctaaaaaatcttaggagttttcattttgtgatcttaaaattaaatgttgaggtaaagtttaacggcataagtaatttccgtttcttcaatttctaattgatgtttttggggatataataaatccaattgttttcgaacattttctaagccaattttagatttatccgagattttattaaaatcgtttttaggttttgtgttgtcaatgctaaaaatgatttgttgtttgttgctttctaaatgcaaaaaaatcattgctttttcggtttcgttaattaccccatgtttaaaggcgttttcgataaaagttaatagaattagaggagatatcttgttgcttacttcgatgtttttagtaaatgaaatagtcaatctgttttcgctgtagcgtaatttttccagaccaatataattttcaattaacgcaatttctttttcgatcgatacataatcttcgttgcagcgatagagaacaaaatctaaaatttcagataattttgcaataacttccggtgctttatcatctttttttagtgttaaagtatatagattatttaatgtattgaaaaggaaatgtggattcagttgattttttagaatcttcagttccattgattttttctcttcttctaattttaaaagccgttgttgtttacggttaaaacttataaaacctaaaataataacaggataggtaaggaacgagaattctcttagcatcaatttaaccgaagttaatctttcgataacggtcattttatgcccaagccaatcatcaaagaaacctgggaattttggttcgagataataaaattttaaaatcattaaaagggcaaaaatgaaatagagccagcccaatgcggaaattgtaaaaagtaaatatttctttttatttagtgtgtggggaataatccaataaatcagaccatacccaacagctgcctgtgctccaattttccaggaatatataaatagaaaagcataagaattttcgttgtcagatttattcgaaaaataaaaaaataaaaagaaaatccagtagaaacaatgaagagctgctctttttaaatcaatttgtttgatgaaattcataggatattttaaataggagcaagataacaaaatatagaaataagctttgtttaggactataaataataagattttgccttcaataatagcagttcggcatacgaatacaacagaattgaattattcattatttgattgctaaaactaccttttcagttgcgcctgtaatgatcagaagttcttccaattatattcgcttaaaaataattaggatcaaatttatccttgtattgattctatttctgagtgacatgctgaagtaaaatcgccttaaaataataaacggacctaaaacgaaatgaaaaaaatgattaaacacacaattggtattctgattttaataagttctttaaacttattttcgcaagaaaaaaaacaagaaattaaatacaacgaggcttccagagcaatcaggcctactttgtttgcagacttaggcgaaacttgccaaactccggacgggatggctcttgataagaaaggaaatttatttctttcgattacaaatgcaatttcatttgaaaagtacggcagtaaaattttaactttcgataaaaatgataaaccgataacctggttcgacaaattaccattgcatcctgttacacaaaaagtacatccgatgggaatggagtttggccctgatgggaatctatatattatggacaatcagttttttgctggaaaagagaatttctcgagattaattagaattatagtaaaagacggaaaaccaataaatgctgaggttttggccgaaggatttaattttggagaagccataagatggtttaaaaaccgaatttatattacagatgctttgtttgaaaacagaagagaaagcggaatttatagtttttcgttagaggaattaaataagaaaaagattgtcctggattcatcaaataagaaaaattatcggattgcaacttttatcttaaaacctgaagttaccaagagaacaattgggattgatggaattgctttcgataaaaagggaaatctatatgcaggaaattttggtgatggagtaattactaaaatagaattctacagcgatggaaaagtaaaatctaaaaaagttgtttttgattcggataaattaaaatgttgcgatggttttttttatgataaaaagcgaaactctattttcattgccaattatgaaaacaatagtgtacacgaattaaatttagatacaaatactatttctttaatttgggaaaatgataatgctgacggttctgacgggcaattggataatccttgtgagactattgtttataaaggaaaactgttagttgtgaactatgatacttttgaaggagaaaaaaacaaagaagcagatcgttttcatactatttccagttttaaattataaatcctgttcagaaataaaaaacaatagtttaaacaaagcaaaagccaaatctaaatttttagatttggctttttggtattgactttaagacttttgactttccagctttaagactatcctaagaaaggatatctgtaatcttcaggagttacaaaggtttctttgatggttctaggagatgcccaacgcaataagttcaatgcagaacctgctttatcgttagttcctgaagctcttgctccaccaaaaggttgcattcctacaacagctcctgttggtttatcgttgatgtagaagttacctgcagcattttgtaattttactgtagctacttcaattgcataacgatcctggctaaataccgctcctgttaaagcgtactcagaagtagtatctactaattctaaagtttcttcccatttagcatcttcgtaaacataaatagtgattacaggtccgaataattcggtttccattgtagtatattttgggtttgtagttacgataactgttggctcaataaagtaaccaactgatttatcgtagtttccaccaacgatgatttcagcatcagcgtcttttttagcctggtcgatgaagctcgccaatttatcaaaagaaccttcgtggataaccgctgtaataaagtttccgaaatcttccggagaacccattttcattgattttacatcggcaactaattgttctttaactgctggccataaactttgtggaatataagctcttgaagctgcagaacatttttgtccctgaaattcaaatgcaccacgggcaattcctgtagccacttgttttacgttagcgcttgggtgtgcaatgataaaatctttaccaccagtttctccaacgattcttgggtaagttttgtagtggtgaatgttagcaccaattttagcccagatgtctttaaatacatgagttgatcctgtaaagtgaactcctgcaaaatcacggcttgctaaaacagtatctgtaatcattaaggcatcaccaaaaacaacattgattactccatcaggaacacctgcttctttgaaaatatcgataatgatttttgcagagaaaacctgactgtcgcttggtttccaaaccacaacattacccatcatagcagcacttgcaggaagattagcagcgatagcagtaaagttgaaaggagtaatcgcgtaaacgaaaccttcaagaggtctgtattctaaacggttccacgtagaagaatctgattttggctgatctccgtaaatctgagtcatgaattctacattgtaacgtaaaaagtcgattagctcacaagcagcatcaatttctgcctgatgaatatttttagactgaccgatcattgttgctgcattaatgcgggctctgtatggtcctgcaataagctcagcagcttttaagaaaatagcagcacgttgttcccatgccatatttgcccatgcttttcttgattcaagagcgttggcaatcgctttttcgatatgttgtttttcagctaaatggtaggttcctacgatatgtttgtgatcgtgaggagctgatattgttcttgtatttccagttctgatttcttcgcttccgatgtataacggcacgtcgattttagagttccataaagtagtgtaagctgcctgaactgctgctttttctggtgaattaggtgcgtatccttttaccggttcgtttaccgcttttggtacgtgaaagaatccttttagcatgttatttaaaattagataattagacaatttaagaattagacgatttgattgttacgaataatctaacgctgcacaaaagtacaaaggataaattaataatttgacaaatttgtgattaagataacgataaaaaagggagttttaaacctaatttttagtttaaagcaaaaggagcacacattctgaaagttggaacaattactttgaatgttttggtagtggtaaagttgatcatattaaaatgacctttcattgcaccataaggagatgacaataaacagcctgaactataagtgtgattttcgccgggttttaaaaccggttttttcccaataacaccttcaccgtcaacaatctcaaggtcgttcaaagagtcaaaaatttcccagtgacgagaagttaactgaacagaatctttgctgtgattttcgattgtaacgacatagctaaaagcaaagtgaatcttatagttcttgaagtaagtgccttcaaaactagtcaaaacagatatttttatgcctcttgttatctgagaaaccatactaaagtagtatatatgtgtgcgttataggtgcaaagctacgaaaaaaaatctttctgcctaaatccttaacaatgttttaatttatgatgtttatcgagcttgcatttcctttgccaatcactctctggtatcgatctgtactttctctgtaatacaccaggatggtgtattcattttcagtctgataaaagttaccgtctatggcattttcataatcaatcactccttttttatcggcaaccgtgtattgaaaagcggtaaaaccctgtttgatcattacggctttttcaaatatacctttatcggaattgtaatccattttgtattccggagacaggctgtaattgttgaacatcccgctgatgtaaatgtccttattcgaggctctgaaagttggggccgacagactgaaatatacccaggcatagtcagcttcgatttcattgttggaagcattgatattcttcactacgaaatttccgtttacatcctgattgttcgagtaaatctgattggctcttgccagattggtaaacaaataagagttataaatgtcgccgctgcttcctaccttggctacattggtgctagccgcacgtatgtctttgttttcaaaatacaaaaactcattaccgccccaaaactgagtttctttatcgtatttgtacaccagctgattcccaatggtgtattgcggcacaatatttttaatagaagtgttaaagttgccattctgtagcagcagcacttttacattttgcagcggagtctgaaaaacaatatcattagagctgatgttaaaatccagattttgtttgtgttctatgttagacaaatcccggcttctttttacctgagtcgctacagtacagtgattttcgtataagataaattttctggatagcacaacttctctgtcttcatttaaaatacgaagcatataattgccggaaatacgcagctgactggtaaactgattcgggaaaggaagtctgtaatgcgaatagatttgaagtgtattaaacgaatttaaataatcagtaattcgctgattgtcaaaaccgctgatgtagtctgttttcggaatatcagacggtttccagttgtaatcgcagtgtatcacttcaaaataataattggcttcattaccaaataaatcgtcaaattgaaattgaaaggcttcccccaattcgaagatcggaatcacattactaccgttctgaacaaaagagacggttttaatattgtaaggcggatttacttccgtttgtacttcctgagcagtagccgaagcaaaaatgaaaaatataaggagatttctaaacaatttttttggcatcttattaagttgtaagattgtaaatataacaattttatagaacgtaataggatgccgttttgcaggttttgaaaacaattgatcaggaacccagcaggtattcgagattagcttcaatttcgtcgctgatatgactttcttccaaaagcgaatccgagagcagttttttgttttcctgtaacttgatgattttttcttcgactgtgttttttgaaatgaaacgaactacgtttactttgttcaattgtccgatacgatgtgctcttcccactccttgtttctctgcaaaaggattccaccagggatcaaggaataagacatacgaagccttggtaatgttgagaccaacgccacccgccttaagggaaatgaagaataacaaaggggtttctttttcctgaaatcgttttacctgctgttctctttttggtgacggagtttcgccggtaatctcacaatattctattttgttttctttacaccaatccgtataaaaattcaaattggtcacaaaggagctaaagatgatgattttttgttttcccttgactaagtttttcaggtaattcgtaacggcaatgtattttccggaatctacttcagaatcctgatcaaccattttgggatgattgctcagctgtctcagcttcattaaagtgttgataatgctaattttatcaggacctgacccatccgttttcagtaaaaagttacgtgcttttgatttctctttttcgtatagtttttcctgttcagtatccatattgcagtaataaacctgctctgtcaattcaggtaaatcttttaaaacctgttctttagttcttcttaaaatatagggctggatcaggttttttaattcatttaaaacttcttcgttctgttttttctcaataggatttttgaaattttccatgaaaaaagcataactgcccaagatatccggatttataaactgcatctgcgaccataaatcgtcaagtgaattttcaataggtgtaccactcaatgcaattttatgccccgtgctgattttattgatggctttgaaaatcttagaatctttgtttttaatgtattgactttcatctagaatcaaataacggaaatcatatttttctaaaatggaaatatcccgatgaacaatgctgtaactcgtaaaaattaaatcggtcgaatctaatctacttgccagtaattttcggtcattgcccacgtattgcatttttgaaaaatgaggtgtaaactttcctgcttcattgtaccagttaaaaaccaaagaagaagggagaacgatcaaggccttcagtggttctctttcgatagtcgtatcgtttgagaataaatcaaaattggtcgttttggtcgtaaagcccagttgttcctgtaccgcaactaaaactgctaaagtctgcagcgtttttccaagtcccatatcatcggccaaacacgcgccaagattggcattaaagtgacccaaaagccattttacaccatcaatctgatacggtctcaaggttgcttttaataaatcggaagctgtaaattcagctttatgaatttgatccggatcattggcgatttctgaaattccgtctaaagcagtaaaattacttttacgcaacaaaacagttccgttttctgtctttgccaattttgccagagaaccgtatttactaaaccattccagcggaatcaaaaagtaatttccgtcaggcaacataaagagtctttctttgctttttatgtttggaatgatttcgctgaaattgattttataaggaccaattgtgatgattattttaatgtcgaaccaatcggcttttgtttcttttgcaattgaaatggtgttgctttcggtgatgatttctttgctttcgagtttgagattctgaatggtaaaacccagactttcgagtggttctttatggtcaataatgaattgaatattgacatacggatcagaagtctcaacatctgaactcaatccaaacaattcatttttgatttttgttaaacccagacggagtaatttgtctgtataggaaatctcattagcgcttcgtttaaactgaataattttaggttcgtttgcaacactaaaatcaacaaaagagtgcgtttttttagttttacccgcatcaaacgaatagccgttatagtcaaaaaaaaggttgaggtaataacagtttttaaagaaatcaaaaacaggctgaatcgtgcaggaaataatggtgtcacgaagctcaatttcaaagccggtagattcgatgtcgatttttttggctatttccggaatgaaattcttgaagtaattgtcaactagttttgacggtatttcgattgatttcttctttaaaaaaggcagcagttttttagaattaagttcttttaattgcccaagttttttgtcgatgatcaaccagcttggttcgtccaaaagaatatccacacttttatccattggtaaaaatgtggtttcgccttcttttaaagataaagtataagtaatgccttcggcgtgtttgtcaaattgaatctgaggttcaaattctaacggatttgtatcgactctccaacgataaaaatccttttccgcactcatattagcagagaatggaaattgttcttttacaattagattgtaaaaggattctaagttaaattttaaatgctgacgaatggcaaattcaattttggagtctttttgtaaatcggcaattgttttagccgatttgattttggtgctgaatttcttgaaaataaaatcaggttttaaagcgtcgcaagccgtcagtattttttttgtattggaatctaaattttgaaaaagaactccaaaactttcaagtacatctgtactcgcttttttgtccagatatttgatatcatcggtattctcaatgatataagctgttgggatatatgtattcaggtttttttcaaaactgatgtcaaagcagaactgaaatgattttgtaggttccaagatttagggatttggttggcttataatttagagattgggcaaaaaaataaagagttttcaaaatatcaataatttgaaaactctttttaaatgaacttgtatcacttatagggtgaaagaattagttttcctgtttgaagcaaagcggaatgatttcgccttttgccagacaatatttttctaccagttccggagaaattttatgagtatagtcttcttcgataacgataaaaccgatgcttcttaacttgtcaaaataatcacggccataaatacgtacgtggtcgtactgaccaaatattctggcacgttctttttgatcggtgatggtatcgtcagcaaaagtaaccgctcttgataagtcctgcgggatttgaagaattgccattccacctggttttaaaacgcgaaataactcctgcatggccttagtgtcgtccggaatatgttctaaaacgtggttgcataaaataacatcgtattcattgtctttaaaaggcaaattacaaatgtctgcttttacatctgccaaaggcgagaacaaatcggttgtcgtgtaatccagatttttctgtttgcggaatcttttgtaaaaagcctgttccggagcaaaatgcaatacttttttaggtgctgtaaaaaaatcagtctgatcatttaaatacagccacagcaaacgatgcctctctaacgaaagtgtacttggcgaaagcacattgttacgttgtttcccgtatccataaggtaaaaaacttctaaaacttttcccgtcaatcggatcagtatatttgcttcctcttaatgataaagctaaaacaggacgtgccacataacttaaacgaattaatattggacggggtattgtattaagtactaatttaaaaagtttcttcacggtaaatgtatttgaacacgaatttcactaattaacacggattaatgttgtggtgaaatttcacgaaccttgatttgggttaaagtattattcttttatatttaaggctgtcttctccaaaattaactagtagacccagtttgttttgtgatgcggccaggtaatttaatgtttgttttatttcacttgttgttagagcagtaattgcttttagttctagaataatttcgtcaaaaataacaaagtctgcaaaatagtaacttggcaatataatatctttataaacgataatatcttaattcccgtttgtacgggatattgtttttttgaaattcatattctaaagcatcaccataaaccttttcactatgtccctttcctaaaattttatggacttccatacagattcctataattttataagactcttcttttaaatacagctcattcatcatcttccttcagtgaaattttaagtaacttattatttcgtgctaattcgtgaaatctgtgttataataccagcggcacttttcggaattcatcttcctcattgctttcgattccgagggctttatagatgtattgaaaagtcgataagatttctggtttaccatccactaaagcaacgtcgtgttcgaaatgagcacttgcttttccgtctgcggtagtaatagtccagccgtctttgtgttgtttgatgtttcgggttccaagattgatcataggctcgatggctacaaccattccttccacaaatagttttccgcgaccgcgttttccgtagtttggcatttctggttcttcgtgcattttctgccctaatccgtgtcctaccaactcgcgaaccactccgtatccgtgagcttctgtatatttctggatcgcatttccaacatcttccacgcgatttccggctttaaattctctgattcctacgtaaagagattctttggttactttcaaaagttttttaacttcaggagcaacttctccaatttcgaaactataggcgtgatcaccgtgatacccatttttgaatgcaccacaatctaccgaaataacgtcaccgtttttcaaaggtgtattgttcggaattccgtgtacaacctgagagtttggactcatacaaagtgaattcgggaaatcatacagtcctaagaagcttggaactgcaccgtgatcacggataaattcctcagccagtttgtccaaatataatgtagttactccttctttgatttcagaagcaatcattcccaatgttttagatacgatcaaagcactttcgcgcattaattcgatttcttcacgtgattttacaataatcataatttcggattttcagttcgcaaaagtacaaattttaatattatctttttatttaaaagtttttcgccacgaattcacgaattaaaaggaatgacaggcgtttaaaaataacgaattactatttatgcataaagttcgccaatagtaattcgtgaattacttcgtccgttcgctatcgctcgggtcgtggcgaacggacaatgaagaggaattattagttcagagaaaaaacgtaaattagtaatcattgaaatgaattaaattatggagacgtctgtagatcatgaaaatatagtaaagaagaaagccctgaagcggatgaaaaataatgcattgggactcttaggtatcgcagtgcttttgtttgtagtagcggtttattttaagattccgatgcttcaggcttttagtgaagcggcgatggtgggtggtatcgccgactggtttgcagtggtggccttatttcgtcatcctttaggaattccgatttggcatacggccattattccgactaagaaaaatgaaattggtgaaaatttagggagttttgtttcggaagaatttctgaatcgggagaaactggaaataaaactcgaagaatttaattttgctacgaaagcagctgattggctttcacaggaggaaaatgccaataaaattgccagtgttgtagctttaaatattattcccggagttttaaaaacgataaaagatgaagatgtaaagcgattcattcaggttcagttcaaagaaaaactggaagcaatcaactttggagattgggtagcgctggcgttagagcctttgcaaaaaggaaatgtgaaagaggagctgctgacaaatgtgctgaatgtgatgagtacagagcttgctaataataaagacctgattcggaaaaaagtgaaagcatcgacaccatttttaagttttggtttggcggataaaagcattacagagggagtttttaatgggcttgctgattttttaaacgaagcaaaacatcccggaagtgcaatccgaattaagatagacgagtatgtgtataattttctggacaaagtaaagcattcagaggagatgcgggagaagattaatactgtgatactgggttttgccggaaaaaaagaggttcaggattatgtcaacggaatttgggatgaaataaaaagatcgatttcagctgatttggaaaagggtgaggaatcgtcaattaagaaaaatatttcgggtttgattcaggggttcggaaatggattaaaagaagatgctgttatgatcgataagatcaataatttcatcaagaacgatttgctttcgatgctgctaaacaataaaaaagtgattggagatttgatttcgtctaccgtgaaaagttgggacgggaaggaggtttcagaaaaattagaactggaaatagggaaagatcttcagtacatccgaatcaacggaactttggtaggaggtctgattggacttgtaatttatgccgtcgagtggacgtatcattatttggtctaatccatcagtaaaaaatgatttaacacacagaaggattatacatttaaaaaagtgaaatgtctattttaggagtatcagacctattagtctagataatagccacagattaggggattaaaaagattatgaaatctgcaagatctgcgtgcaaaaagatttaacacatagagacataaattgaatgcacaaaaaaacgcaaaaagaaatatgtctctatgtgttaaagtagattttaaactttaatccggattggccatgattttgaacaattctgaattcgagatgtaaaatcggttgtcgagagcaattgcggctagttttgcgctaaccagattgttttcacgtgtattgatcagaaataatgagctttctccgaaagagaacaatcgttcttctgaggttaacatcgcggcattattttctactaaattttttaccagtttcttttgtctgatcagcgaattgatttctactttctgtgcacttattttgttggtcagctgtgttcgttccaaagcaagagcaaattcattttcctgaagtttgtatttggccagtttcagacttccacgttcttttcgaagaaacaaaggaaagtaaaattctaagccaactttgtaatcgtcaaatttataattgtcaatatatctaggatcagataaataagaatacccaacgtttattttaggcagcagcatgttttgcttcaggtctttttcaaccttgagtaggtctattttattttgcagagcattcaatttcggatgtgtttctaagttggtatcgccttgcagtagatcgtttgttttcagcgtttcctgtaaagttgattcaagcgctgtttccggcactaactcgtctgaaatttccaatgggatgttattctccagccacatataattcgataattcgagtttggctttggttaattttaatttagaatcttccaggcttaaggctctgtttctgacaataattccggcttcaatactgtctattgccggtttgtcgccctgttcgatgagcgatttgattcctttcagacgaatttcagcattgttgttgtacatttcataaagcttcatttcctcgaagtttttcttccagttgaaataagccagtgatgcatcatacaaaatgccaactgcctgaagttttctttcagcctgacttagtttgatttgaattttagcttttcgcacatctgccattctttggttgatgaacaatccttgtccaattggaacactgataccaaaagaagttaatccctgattgggagtagtgttttcaggattcaggtaaactccttcgttattgtcgaatcccgctttcagttcaattccgtaccaggttgggatcttaaaactgctgtttagaatcgaataatattctttgtctttaaattttttctgactgaaatcaacttcaatttttgggtcaaaaccaccacgtgccatcatcagattggcctgtgctttgctgacttccaaattggcatttttaaccaatggatggtatttttttacataccccaaaaactcattgtaggtgagttcttttgagaagggctgctggccaaaaacagtacagcccagaaaaagaaaagcgataagtattggtttcattattttttttctttagttactttttgggtacttttataataattaggagggaatccgtttagggttctccagatttcgaaccaaattggcacggtgtctaatagggcaatagtttgagcgcccgatccaatacttagttgttttggccatttcgtctcatccgggtccggagcaattaagattctgtatttaccattatcactgataaagttttctattgctacaacggtacctccaaaagttccgtaagacatgtccggccatcctgaaaatacgatggtaggccacccgtcaaaccaaacgcgtactttttctccttttcggatcaaagggaggtcaattgggctgatataggtttctactgcgatatcataatgagaaggcattattgttacaattggtgttccttcttttatcgtttcacctaaacctgcctgcaaagcgcggttgatgtaaccgtcttgtaccgctctgatgtagtacataccattacgcaagctgtaattggcatattgattctccagtttgctcacttgtgcttccgtatcaaatttattactcagcgtggtaaactgatcacttcttgctttggctactttttcaccgtactcagccgtaattctgttaatctctactctggcattgatgtattcatttttgctggtgaggtatttgttttcctgcgtgatgattttagcatctacatcctgcagtttcagacgtttttcttcgacatccgtaagtggtttcaaaccttctttgtttaattgcaccgaacgattgtactgtgtattggcaattcgcaattgtgtttttactgctacaagatcgatactgtcactttttatttttaaaagcgattgtttgactttatttctggcttgttccagttttagttttctctcgttttcgatggcttgaatttgaccggaaagcgtggttactttttcgccataagattctagggaatttttctttgcatcgacctgatttttggtgttttcaaccaaattaggatccatataatcttccttgatctcagaaataaacagaattgtgtctccttttttaacaaagtcaccttcctgcacgtaccatttttcaatacgtcctgaaatcacactctgaattgattgtggcctttggttgggttttaaagtggttactgctcctgaacccgaaatattctgagtccacggcagtaaaagtgcaataattcctagtatggaagatgcaattataattcggtttaaaattttataatgtggcctgttgcttaggtttcttacagtctcatagcgatcaagcggctgtaattttgttttattgtcagagatatttaacatggcttattgttttttttgatccagtataatttgaccgttttgcattgtaatttttcgcgtcgatttggttttccaatatggatttttggaagaaacgataatcgtccatttgttcttatccgaggtaataaaatcgatgatttcattcgctactttttcatccatggtgtctgttggatcttcgtaaaagagcacttttggcttgtggataatacttctggctaacaggattttttgagcattagaagacgataactgttttccttccgggtgaatatgagtattcaggcctttaggtaataatttaatcagcggactaagctgaactccgtcaagagcccatttcaaatcttcggtactgatcatcggatcattaaaagtgatgttctctaaaatagtgccttcaaatggtgtttcgttgtgaatgatgctgccaatttgtgagcggtattgtttcagatttatttttctaaaagtatcatcgttgatgtaaaaagctcccgaactttgtcttaataagcctgataacaatcgaataagcgttgtttttcctgatccgttttcaccttcaataacaattttttcaccctgatcgatttttaacgtaatagaatctaaggcattggttggagaatccggaaatttgaattttaaattctctgtttctaaagagatgctgttgtagcagtgatcgtttagagaatcagactctgagttttcctctaaagctaagtccgttacctgtccgattttttcaacagaagttaaaacatcatagaaactttcaagccccagaatgattttttctaccgatgtaatcacaagtaaaatgataatctcagcggcaacaaactgcccgatgttcatttcctggcttagtaccagataccctccgatagacaacaaactggctgtaataatgactttgaaaataatcaattgggtaaactgttttttgattacgctaaagtgtttctctctgtaattcaggtaacccgctacgatcgaattgtttttttgaagcgcaaagtcataattcagttcattgcggaaactaaagttattacgggccatttcctgtaaccaccccgccactttgtatttgaatttggattcttttaaacttgtttctaaacctgatttgtacgagaatttaaaaataaaatacaaaagaaggaacagtaaaagtccgaacacaataaaatagggatgatataaggacaacagaataattccgaaagtaatctgcagtaaagcggcagaaaaatcggttaataattttgaagttcctttttgaatcgttagggtatcaaaaaatcggttcgttagttccggtgggtaagtgccatacaattcttctgattttattttaggcagacgggctgcaaattcaaaagaagcacgtacgaatattttttgctgtaagttctctgtgatacgcagctgcataaacgaaagcactccaacaagagccacaccgcccactacaagtataataagtacgatccaggaaacactaactcttccggattgtataaaagtaatgatggcctgaattcccagtggaagcgataaactgactaacccggcaaaaatggcatagaaaaaaatctggtaaatgtcttttttgtccagttcaagtaaatggtaaaatctttttaaaggagtcatactgtttttgttataattagcgcaaaacgttttctgcaaggtttaggtaaaattgagttgtcgtaaccgtctcattacaatctgtaattgttttcaaatgatcggttagaaaatgctgatgtaaacttccttcgacaatggttgaaaccagtgatttggcaaatggataatcgggatttacttcttttacaatctcaacaattcgattaatcattcttttgtaaattaagaaaaagccctctttgttttcctggtcaacttctttggtatgaagtgttttggtgaactcagcaattatgatcttatttaaaatagactcattaatatgatcggtataaatatcgtcagatattttttcggttacaatcgtgatggcttttttaagcttttcttttttatcggtgatgttagtggtattaaaaactaatttatactcgatccagctccagtaccaggatgacagatacaccagcagtttgtgtttgttctcaaaataacgataaatcgaactttcgtttgaacctattttttcacctaactttttaaaggtaaaattatcaaaaccaatatcgtcaattagaagaatactctgctcaattattttttttcccaacgcagatgtttccggatcttttacatagatcttttcgttgatctgcatttttatatttgatagtataatttgcatgaaaaaacattttttttgcaaagataatagtaaagctattaattaagaaattttaactattatttatgtttgtttttttaagtattcagtctcagtatacagtcaaggtctcagtcacagtctcagtcacagtctcagtcacggtctcagtcacggtctcagtcacagtcacagtcacagtattcagtttcattctcgttttaaaatagaaaacccgacagatttttaaaaacctgccgggattatttattttgaggatccaatactatcgcgactcagactgaaaactgcgactgtataccgcgactgtatactgcgaccgaatactgcgactaaaaactacgtactacagcaacgaatggcaagtcataacatttggctgaggcacacccattaattccagaatagtaggagcgatgtcacccagaacaccatcctgaatatttttcaactctttatccactaaaataatcggcaccggattggtggtatgtgctgtatttgggcttccgtcagggttaatcatcgtttcgcaatttccgtgatcggcaataacaatcgtggtgtaatcgttggcaagagccgcttctaccacttcttttacgcaggcatctaccgcttcacaggctttaattgcagcactcatgattccggtatgccccaccatgtcaccattggcaaaattaagacagacaaaatctacttcgcctttgtttaattcaggaaccaaagcgtcttttaattcataggcactcatttccggttgtaaatcgtaagtggcaacttttggggagtttcttaaaatacgcgattctccttcaaatggagtttctcttcctcccgaaaagaaaaaggtcacgtgtggatatttctctgtttcggcaatacgaatttgttttttacctgctttttccaaaacctcacccagagtttcggtaatattatctttgttgtaaacgacttttacattttggtacgtttcgtcatagttggtaagcgttacataatacaagtttaatttgtgcatgttctgctcgtggaagtcttgctgcgaaagcgcttctgtaagttcacggcctctgtcggttctgaagttgaaaaagataactacatcatcctcggtgatggttgccaatggtttttcctgctcgtcaaccattacgattggagcgataaactcatcggttacatcgtgtgcataactgtcaagaacgcttgaaactgcatttttagacggagttccgataccgtttactactaaatcataagcaagttttacacgctcccatcgtttgtcacgatccattgcataataacgtccaacgattgaagcaatttttacaggagtatttttgatgtgctcttctaaatcctgaatgtattttgctcccgatttaggatcaacatcacggccgtctgtaaacgcatgaacaaaaacattttccagtccgtattcctgagaagcatcaattaatccgcgtaaatgcgaagtatgagagtgaacacctccgtcagaaactaatcctaagaagtgaacttttttattgttttctttagcgtaagtaaaagcatcaataagtacctgttctttggcaagtgtttgatgcgctacggctaagtttattttggttaaatcctgatatacaattcttccggcaccaagattcatgtgacccacttcactgtttcccatctgaccttcgggtaaaccaacgtttagtccgtcagtacgaagctgagcgcttgggtaatttttgtaaaggctgtttataaaaggaacatttgcattgtctattgcagatactttagggtcaggagattttccccaaccgtctaaaatcataaggattactttcttgttcattagttttcgttttttacaaagataattcatttctaaagtcgacaaaaaagcgcggtgacaattatgtttaataaaatgaagcgtagtaaaaaatactaatttggttgcagaaccctaaaaattttaaaattaattcacgctaggctcttcttctgatcttatttttgaccccattgtagtcgataaaatatttcacacttactgaaaagatatgttttaaggcctgattgtttagtaaatcggtgatgttgtgtttgaagtctttgttgataatgcgttcaaaattaacgccattattgcgatataaaaccgaaagctgactacccggagcaaaccaccaggaatacgataaatcagtgttccaggaataaaagcttgagtttttattcttggtgtattgtggataaggcgttaaagttccgttttgctgaagctcgagtatgtctttattttcggcataagaccaatattgtcttacggccagattaagtgtcattgcactgtttatggcatattttccgtttaaagtgttcgaataagtaataacatttcgattcgcaaaaacgatcgtttcgggagtattgtcattatcgtcgttgtcaaaatcgtcaatataacctttgttgttgtttcttcgaagaaagctaaaagcataggttagtaaaagcttatcgttaaaacggtatcttggtccaacatcaacaccataagccattcttcctgcttcgtccgcaaagattataaatggatttaagtccaaagcaaatttcttgttgtaattagtcgaaacgcttccccagacttctatttttcttggaatgatgacatagcggttttcggctcttggctcgtaataatcatgtgaatttagaggaaaaagatcaatcccggcaccgtaaaaattgtttttcagagtcgaaagattgacttcagcactcattttgttatcctgcactttaccggattctttattgaattcggtatacatatcataatcaattctgaaagtattaaagagctttgtagggtttagaatgcgatagttggcatttccgtaaagattgtaataattggtataaaaattaatccccatgtcgttggggtcaaaatctttagaaacaaagtctgaggcaatgctatagcgatagttcccgctggtttcggcaaaacgaatggtgctgaaaacaccatttttgtcttcagtatcgttaatcagactgtattttacattaccggataagctgtaggtgttggctttggttcttaaatcccatgccagtgccgttacgttggcatccctgtaatgtccatttcgggtaacgtttgtattgataagagtcacggaagaatttttgcgaaagcgctgatctaaaatcaatacattgtaattggttaggggttcagcaaccacacgtcttgtttcccctgaaagagtgtcttttatagtagcaaacgttttttcggtaaccgcatttaagatcccgattcctaatcctttttgggttcttcctgaaatttttaaagcgttgatgaggttcacattctgaacttcttcaattattttttcattgtcatttaaagtaatgtctatagaaggcttacctccaattcttctcgaataaaacaaacctcccttattgaacaaatcagttccttctgtaaaaaaagccctgttttcgttgaattgctgttcaaacggacctaaattcaaaatctgatcgtcgtattttgtttgtccgaaatcaggaatcagaatcgcgtcaagcgtaaaagcatcattaataccgtacttaatatccataccaccttttagtgttccatatgttttttgaccgtctgaagcatttaagtaataagaggcgtaaggcataaaaaacaatcgggtaggaggttttatattgacgattccttccagattaccattttgttgtgtgaatgttccaattttggtgtcgattaaattccaagtatactttttacgttcccgtctgatctctctgaaaaaattaatgccccaggtttgtttgtctccgcctgaaaagcgtaaggcagcatagggaattttgatttccactgcccatcctttgtcattcaacaccgctttgctaagccatactgcatcccacgaataatcttcgccattggcatctgtcatgatgcagtcgccctgtacatctgctgccgatacaaaaaactgaaaattttgctggccatcgttaaagccattgataaaaacgccaaacatatcagaagttccgaaattgtcacgctgtgaaatttcttttaaaattttagaagggtcatcgtgcagcgttgcagcaatatagatcgcatcattattgtataaaacccttacctcggttttttgattgtcaggaataggtttgccgttatcgggctgatacattacaaaatcggtagcaggagaaacatttttccatgcaggttcatccagttttccatcaattaaaatgttttcggtagtcagttcagcctgcagtattttcttttgagcatgacaccaaaaagtaaagaagagaaagctgataaaaactaattttttcatgatagtgtaaaaaatagaagaatggatattgcgctttgattaatagaccacggtttttttaaaatgttacagttttgatcgaaataaatgattttcctgtgttttttgcaagaaaagtacgaaaaatcaattttttattcatccttgagtaaacctcctacaaaaatatttgttttttgaaccaaatactaatttgttaagctgattctgttaaagtttcaccaaaaaagggctgatttacagccttaaattttgccaggtatattttttttatacttttgccaaacccaaacctctgtttaacctaaagaaattcaatgatttacaagatttatccattactggtgtttttgctgttatcttttggtaaagattcaaacaacacctccgaagttaaaaaagcagttgtaaaaactattgctaaagtagaaacgcttacagttgattcgaaaattgagagtatttacaataccttaaatcccaatcatttttcattacctgaacttagaactttctctgaagccttaaaagggttttacttgttgaaagaaagaggcataatccaaaaagacatcctgacacttatcgattttagcctgtcgtcaaacaccaaacgtttgtgggtaattgacttggctaccaataccattttatttaattctttagtagcccatggtagaaataccggagaagaatttgcgtctaatttttcaaatgccaattcttctttcaaaagcagccttggattttatgctacaggcgaagtatataaaggtaaacatggtgtttccttacgcttagacggactagagaacggagtgaatgacaatgcacgcgaacgtggagttgtcatgcatggagccaattatgtttcagaatcgtttatcagaagcaacaaacgattgggaagaagtcagggatgtccggcaattccaatgggattgactaatgaaattattgagatcataaaagacaaatcgcttttgtacatctaccatccatccagaagtttcacgatggaagagaggctaatttcttaatttagcatacaaatccgaatccaaattataaatgtcagctctgaaaatgagctgattttttttgctccatgccgtccagtaccattggtataaggcatatttttttgtgattcgaatactggttgtttttttggaagcgatgatggtgtcaattttatctttggaccaattggttgaatctcccaaaatatgttcagccagttccagcggattttctacacgcacacaaccggaacttaaagagcggttgtttcttccgaaattatttcgatggttcgtatcgtgcaggtaaacactatgattgtttggaaataaaattttcattaatcccaaagcgttattgtaacccggactttgtacataacggtaattcccaggtttattttcgttccaggcattaggatcaactacctttccggcagtatcataaatagtaatatttttattggccagataatttcgattgcgtttcattgccggaaccacatcttcctttaaaatagttggcggtaccgtccaggttgggttaaaaaccaccgttcttaattttgaggtaatgattggagtttttctcttacttgttcctacgacaacattacggaccagggttgtgtcctgactttcgacaacatttaatttgtaatcaggaatgttgataataaagtagtcttcagccaaatctgtagtataccatctccagcgttctaagttggcgataatttgatgttttcttttctctttagaaaaattaagggcacttatcgttccaactccaataacaccatcagcggctaagccatgtctttcctgaaattttttaaccgattcgaaagttttgtggtcataaatagaagtaaggctgtcctttccggtcatgtctttccagaacaagagtctttttttgatgttgatcaaagcggtgttagtatcatttaaggtgattttggcaaccgattcaataggctggatatcgtcatccggaaaagtattgatgatttccagtgcttttaaaagttgtttgtaaggagatgcctttgattgaatgccgtctacaatactatccagtttgtttttgttgaatgcttttatcaggacattgttaacatcaaatgttttttcttccagatcccaatcggtgtatagttttttaggatcgagttttcctttatacagatggttgaggtatttttcaaaattataagtcagtaaaacatcgtaagttgccagatcggaatcgcttaacgaactaattttgctttcgaatttttttagtctcgaagctttgtaatcctcaggatccaaacctaattgttcggcattgctcaattgagataaaacataagttcttttttttaggtttccccaaacggtcatgttttctgatgagttgtagaacagtttaagtgtttcacttttaaaagtgccaatcagagcggtatcaattgaaacctttctttcgtcagtaagtataatagccggggcggctttttttaccacgggaataacttttggtgcttctttcttgcagctaataagtaaacatattataaataaaaagtaaaaattcttcattcaatattcttttaaatataaaacaatacacgctatagtttttaatccgaactaaattaccccggggtggaagtctgttcttttcgtaaacgtacaatagcgttttgatgttaaatcaaattggcttcatcaacgctgcagtaggttttgctgcgttagattgcggccttttcagattctttactcttttgaagcttttctgtaaagattttccggatttaaatttgattttctcggcaaatataggtctgattttttcaaataatgaaataattcttattaatttttcattatttaaataagaccggttaagtcggtcgttttctaaacttttccttcaaagatacaactttcagctgatttttcctttcgaagcagggattgataatcggaataaatttcttttgctgtagtttcttttatgcgaactccattttatgagaaataattggttttataactttttaattttaaataagttatcattaaatgtgattttttattgatttttttgccgaaaagcttagattttactgaacttatgccttatctttgcaccacagaaatgcgaaaatagctcagttggtagagctccagccttccaagctggttgtcgcgagttcgagcctcgtctttcgctctaaaaaaaagcctcaaacatttgtttgaggcttttttcgtttttgcctgtattcaagtgtattcatgtaaaaaaaaatccaaattccaaatttgattgataaactggaacttggaattttaaaaaattgtattttatttcagattgctcagatcgctgcctgtctccagttctgtcggagtttcgttttgaagaaacaaacgagcctgcaggtttcctttcaaagtaattttatcgccttttacttccagccagctgccttctcttaaacctaaaaccggtattgtgttgaaagcatggaattctttaattctggtttcccttgtttcgcccatatgtttagattgtaagtcaggatccaggtaatgtgggttcaggttgaaaggaattaatcctaaggtttgaaaacttggagggtagatgatgggcatatcgttagtagtttgcatagaaagaccacaaatgttgcttcctgcacttgttcctaaataaggagttccgttttttacagtttcagaaagaagctgcataatattgtgtttgtaaagctgtgtaaccagtaaaaaagtatttccgcctccggtaaatattccttccgcattttttatggcgtctgctgcattctcaaattcgtgaattcctttaacagaaatatcgatcgaagcaaaagcttccgaaacctttgcggtataatcgtcatgcgaaatgcctccgggtctggcaaacgggataaataaaatgctcttgcaatttttaaagtgagattgtaaagtagggagtaaatactctaaatagctgccttcgtgaagagtagaagtgctggcaatgatgatgcttttcataatggtttaaactcaggttgaatcggctaaaggtattaaaaaactctctttggaatgcttccttatggggtttaattaacatatttttaccaactccttagtattaaatttggagaacattaagatatttttacagctttaagaaaatctttaaaattttgtcgtcatgtacaggttcgtgtgttttctgattcttgctttagggcagaccgcttggtctcaggctcagagccagaccgttttaaacgggcggataagtgcgaatgttaatgatctcgaaggggtttatgtcatcaatgcgagaacagagggaatgacaacaaccagttcctcgggtacattttctatagacgctaaaccaggtgatgagcttgttttttcttcgatacaattcaaagaaagcagagtggtgttaacggcagaaaatttctcagatatcaactttactgtaaaacttaatgtagtaatgcatcaattgcaggaagttgttgttaaaaattacaataatgtaaatgctgtttctttgggaattattccaagcggacaaaaaacatatacagcagctgaacgaaaattgcgtactgctacaggtttaaatgcgacggctaacggaggaggtatggtaggggggtctgtttctgccgatccgttgctgaattatttttcaggacgcacggctatgcttaaaaaagaggcggtggtagagaaaaaggaggcttttatgaagctgttagaaaaaatgtttacgctggagcattttgtagagcatttgaaaattcctttggaatatgtgaaagggtttgaatattacgccgtagataatgatagatttacagtgattttaaattctaaaaataagacttcgacagaatttttgctggcggaattagcggttaagtataaagaaataattgcaagtgaaaataaatagatttataagtagtagtctgctattgttgttagttcagttgggatttgcacagaataaggtttcaaaagaaatttcggggcagatttttgagcagtctacttcagttgagtccgtgaatatcattaataatacgactcaggtaacggctgtttcagatgcaaacggagggttttcgattgtagcaaaagaaggcgatgttttggtgttttcggcagtaaatctcgaaggatataagaaacgaatcacagctgaagatatgaatgctggtcggattcagattaaaatgacagccaaagaagtggagctgaaagaagtagtggtgaatgaaaatgccaatataacagctgagaatttagggataattccgtacgggcagaaaaaatatacccctgcagaacgaaaagtgtatactgcgacttcaacctcggtagacaagttgcttaacaaaatttccggaagaacagccatgcttaaaaaagaggttaatgtagagaagaaagaggcgctctttagaaaaatggaatatctttttgaagaaaattattacacagaaaggttacggatacctgtagcagatattaaaggatttcagttatattgtgtggatgatgctgattttgccgtatctttgaatactaaaaacaaaacaatgagtatgtttttgttaaccgatctagccagaaaatatctaataattctcgaaaatgaaaaatagcctaactttattgcttatatgcctgatttgtcaaattacactaggacaaaattcaagaaaacccctccacggacaagttaccaataaatcactcgccgttgaaagcggttttgtgatgaatgtgaatgccaatgtgagaacctttattggttcaggcggattgtttgatatcatggcaaaacctaaggataccttgttgtttacaggattggcgtttcagtccaaaaaaattgtgctgacagaaaaagattgtgccggggttttgttttcagtgccattagatttaataagtaatgagctgaaagaagttttggtgcataaggatctaaaagtaaaatcacttgggggaggttcacagaaatatgtcgacatgcagtttgaagatgataagcagtctacagccaaaaatattacaatgtattctgatcagacgattaaatacggaatgaactttgtcaggatttttaaagatgttaaaaagctgctttctaaagatgatgatgataaggaagaagtcgttacggatcttgcttttattgaatattccagagccaatttcaagccaaatttctttaccggtactttgggattaaaagaagatgatatagaattgtttctattgtattgttcaaatgatccggaatccagaaaacatttggggccagaccagaaatttgaattgattgatttcctggttaataaaaataaggaatttaaaaaggtgaaagtttctcagtaatgaaaaataaggtaatctatcctttagtaggaatattgtttttatcgctttctgctttcgcattccacaagttttatgtgggtgtttttcaggtcaattatgccgctgagaaaaagatgattcagattacttcccgaatttttattgatgaccttaataatggtatggagaaaaaataccataagaaaacattcgtaggaaccgataaagaaaccgaagcagatgtagagctgttaaaaaaataccttgcagaaaactttatcattaaaataaacggtcagtcaaaacccatcacctttttgtctaaagagatagaagccggtgatgttttggtgtgttattcgcgaataaaagacatcgataaatttaaaactattgaaatctctaatacgattttagtagattggaatgctgagcaacagaatattacacacgttacggcatttggcagtaagaaaagtattctctttaccgaatcttcaaggaaagaattgttaaagtactaaagaatggataaaattattgatttaattgttattttcacaccctgacaaaattaccattactattttatgaaaaaactttcattattgttgatttttcctgcgatgcttgtcgctcaggaaaaaacagttgctccaaagcaacaaggaaagtacgatacaaacaaattcagccagatgtatgatctgttggctactccaaatatgtttcgtacagcttcgggagcgccgggacctgcttactaccaacaacaggccgattataaaattgatattgaattagacgataaaaaatcaagaatagacggttctgaaatcataacctattctaataattctcctgatgttctggagtatttatggatacagttagatcagaaccaggccagagccaaaacgcaaacctctttagcggaaagcgaaaaaataagccctgttttgcctttggatggcttctcaagtaaatatttgaaaaaggatttagagcgcggttttaatattgaacaggtaaaagacataaaaggaaacccaatgtcgtataccatcaatgaaactatgatgcgtattaatttggcaacaccattaaaaccgggtgaaaaaatctcactggccataaaatggtggtacaacgttaacaactacagaaaagaaggtggtggacgttccggttatgaatcatttgataaagacggaaataaactatatgtaattgctcagttttacccaagaatggccgtatacaatgatgttgaaggctggcagaacatgcagttttggggaagtggagagtttgcattgcctttcggtaattttgatgtaaacattacagttcctgcagatcacatcattgatgctaccggagaattgaccaacagagccgaagtttttacgccagaacaggtaaaacgttacgaacaggctcagaaatcatttgacaaaccagttgtaattgtaacgcaagctgaggcagaagcagcggaaaaagggttctcggaaaagaaaaaaacctggagattcagtgctaaaaatgtacgtgacttcggaattgcttcttcaagaaaattcatttacgatgcaatggctgtgaaaattggaaacagagtagtgatggccgaatctgtttatccgaaagaatcaaatccgttatggggagaaacctccacaatggtggtagcacatactttaaaaagctattcagcacatacttttgattatccttatccaaaagcagtatcagtttcagcagaagatcaggggatggaatacccaatgatttgctggaattatggacgtccggatgaaaatggggtgaccagcaaagaagttaaaaacggaatgatcggtgtggtgattcacgaagtggggcatactttttttccaatgattgtaaactcagatgaacgtcaatggagctggatggatgaaggtttgaactcctttttacaatacatggcagagcaggaactggattcgaactttccctcaagacgcggacctgcgaaaaatattgttccgtatatgagtggagatcagaagtttttagagcctattatgtcgaactctgaaaccattcaccaatttggaaataatgcatacggaaaaccggctacaggtcttaatattctgagagaagtcgtaatgggaagagaattgtttgactatgcttttaaaacctatgccaacagatggaaattcaaacatccaactcctgaagatttctttagaacaatggaagatgcttcggcagttgatttagactggtttttcagaggatggttttactctactgattttgtagatatcggaatcaaagaggtaaaacaatactatgtttctgaaactccgactgccgatatcaaagatattaaagtgaaaaaaggacgttttggatttgaaaaaggacctttcgtatatttagttgctggcgataatgccgaggtaaacgcttcgactaagaaaccactaaaagtagaagaggtaaaactattgtcagattacgttaatcaaacctttacagcggaagaaaaagcaagtctgaaatcacctaaatatttctatgaagtagagtttagtaaaccgggaggaatgatcatgccaattttggttgagattacttacgaagacggaacaaaggaaaattacaagtatccggcccagatctggagaaagaataatgacaccgctaagaaagtgtatgcaaccgaaaaagcaatcaaaagcattcagatagatccgaaattaatgactgccgatattgatgttaccaacaatagctggccgaaagtagaagaaaaatcaaaatttgattaaaaataaacctgaaaatagggctgtctcatttttgagacagccctatttttttataaattgaaatctttcgtaaaagaactgtttttttgtgaaattgctccagcggagcaaaatatttatagcaaatacaatttaccagttttaaaaagctccagcggagcgtaattcttttgaggcagttcccttttttttaagtaaattttaaaaccgtccgttgtaaaatttaatatctttgtgaacacaaaaataaaagatatgtttggtataggaggaggagaattagtttttatactgtttatagtgctaatgctttttggttcagataaagtgcctgaaattgcccgtacaatggggaaggccatggcgcagttgaaaaatgctactaacgatattaaaagtgaaattcaaaaaggagctgaggccaatggtcttgactcaaaatcacttacagatataacgggtaacatcaatgcgcaaattaatgacgccaaaagcaatctgatgggggactccgctaatttattgggagacactactacagaaatagacaaagtaaaagaagatatcgattcaatctcaggacctgtaaaacgccaaagataatatgcttgaaaaaatacaaaaattagacaccgagttattggtgtaccttaacggtttaggttctgaaacatacgataaactttggctgattattaccagtcagttaaattggacacctctttttctgttgtttttttatttgatgtataaaaaaataggtggaaaacaaactttgtatgtgatactttttatagccgtgctaatcacttttacagatcaggttaccaatttggttaaatacacggttcaacgactacgtccatgtaacaatcccgatatcaacactataattcgtgtggtgcaaacccgaaaatcatttagttttttctccggacatgcagccaacactatggcggtagcgacctttttatatttcgttttgcgacgccgcattaagtttttaggatttatattcctatggcctttaatcttcgcttatagccgaatttacttaggattacactatccgggagatatcttaaccggctatttcgctggagcgcttttcggatcattactttatctggtataccgtaagctaaagccgctctattttccgggatagtttttttaaagggtctaaggttttaaaatagtaaggttctaagtttttttcttagagaaaacttagaaccttattggtttggtttttaattattttgttcaattgtctccagttttagctagagaaatatattttaagaaatacaaagagactttagccaaattatcttggctaaagctttttttttcaatactatccttcagttcaattcaatcaaccccaaaaaaacttagcaccttagtatctcagaaccttagagtcttcctcaaagcaccccaaaaaactttggcagtaacgtcattcggatgaaccagttccagtgtttttccgctccacaaaacataatccgacaaaataataccgcctttgttcatttttggaacaatcatctccccgtaattcaggtaattttctttaccggtatcaatgaaagttaactaactcttcttcggtgtcaatagtatgaatttatccgttttcctgtatttcttcatacaaacacaggacaaccagtttggagaattacctggttaatatgttgtaagaaagtataataggtgtagtaattaagcgaaatcatctattatccgatcaaaatgataatgatttaaaatagtagaattgttgtttaacaagttgatttagtattgaatgctttttttgtgatactgttttaggtgtggttataatttacaagataaaaaccaattaatagtaagttaatttttgttaattttaataaaaatatgagttaaggattgtgtaaagaataaaacgatagacaatttatagaaagatgtttaattaaaattaagacggctatgaaaaatttaaattcggtattaaaaaattaccaaaaacagttaacaggtaagcgtgttcttcttatggcggtattattgtcagttaattttggctatagccagtttacatcggaatatacctatcaagatttgcttagagatggaaagtttgaaactataaaagggaataattgggcttatgctactgatgatgacatttgttgtgaccttcttccgcagtattacagctggcattttggcggaggtagatatggtattaatggtttggggatgtgtctccgcagtagcggtggtggcttaatggaactatgggttccgggtgttataaaggcacaaaataaagatactaaaaatgctacttgggataatatatctatatgggcagatggttatgcttcgtacatacaaagtaatggggatgacaatgggatgtttatctcttctaatacaggcaataagatatctttgggagactcaaacgatgatgtcacgattaattcaaaaaaactgatactgaagaacaatgcaggaggggataatttggcacaggtcgccataaatactgatactccaacagacggagttgctttgacagttggaggaaagacatggatgaggggagagttgagggttgccagtagtaacccgattggacaacatgataattttaaagtgctggtgggtaatgaaaaaacagatttgattagctatggtgacgagaatggaatgtttatcagttcagatttaggcaataaagtgactttaggtgattcgaatgatgaggtagcaatcaatgcaaagaaacttattctggattatggagaggccaatgatttggcgcaggtcgccataaatgcgggtaatccggtaaacaaagtggctttaacggtgggaggtaaagtctacattggcgaatctaaaaacatagaaacacaccctgaaataggagaagaccttgaaaaggattgctccttgtttgttgaaaaacaaattttagcatcagatctgaatattattcctaaaccacattggaaggacgctgtttttgaaaatgattataaaaaaatggatttaagtgctttggagggctatgttaaagagaacaaacatcttccgggtatagtttcagaaaaagaagtaaaagaaaaaggatataaaatacatgtttttaatgaaggtcttttacaaaatgttgaggagctgcttcttcatatcattgatcaaaataaaaagatagaagaattgaataagaggataaaggcattagaaaaatgaatcgatttattaaagaaaatagataatgcttttgaataagctttcagtttgacttatgctaggtaggctataggggagggattgactttaagggttttaatcaactataaattatgacaagaaagatttttatattgatttattgcttttacactagtatatatgcacaagaaagtgaaggcagtggtgttgtcacttatccgggaaacgatataaaagtagtcggggagaaaattttttggtccgcaaatcccaaaacagacaatagcagtgagtctgatttactgaccatatactacaaagtactttacaaccgtcgcaacaactactcgagcggtattaagggaaccatagataaacccggaggttacatcaaaatcgaggtgcatgcttacgacagcaagagagcaggagggttgcagctattgacaaatgatgagaagacatttgtaaccagaccgatctataatgtggaaatcatttataaaattaacaaaattgaatttgataattagttctattattgaaacggtaaaaatcaatttactataaaaaaaaataaaaagagagctaataaaacaggtagaagtacctaagggtgattactttttattctttatgtttgaaaaaatagaagcgtagaaaaaataattagaaaaattaagggtaagaacataaaaaaaagcactctagttaataaccattgcttgagatttagatattaggttatacttcaaaatgattatacttcagagaaaatttatttatgatttcgctccaaaaaaaatatacgattcattaataaaataaatgacaattaaaaagtaaattatggcatcaaaataccttaaatcattatcaaaggaagatcatgaggatttaactgagaaattatggaacatccaaaatcaaaattgcttcatttgtaacgataaaattgattttaaacttcatacttcaaatattgaccatattaagcctttggctaataaagggaaagatagcgaagaaaattttgccgtaacgcacgaaagttgtaataaatcaaaacaagatgctgacttaaaaattgcacgaacactttttaaacttaaaaaagtacaagatgatactttagaaaaagaaaacaaatctgcatcactgagacatcttttacttgcttataatggttctaaatttgattttaaatacaatgtagataaagaaaaaatatcttatagtttctcggatttaggtgataatacaatttatgagacagacattcatacagactttatttccaacgaaaaaacatgttttatttcatttccgcttgaatatatttatcacgacgaattaattaatccaaggggaataaataatagcataagcaaattagttaaagaatttgacaaaaaaaaccctcaactgcatttaagtttaggaagaattgaaaacaataagataaaaatttttgatggacagcataaagccgttgctcagatattattagggaacaaaagaattttattaagggtttttattgaacctaatattgacagattaaccgaaacaaatactaatgcgggtagtattttaagccaaatcgcctttgataaatctatcatgcgacaactaaataatactctttattacgaaagaattaaaaaatatcaagaagaccataatttcaaggaagataattttgatttctcagaacaaaaattagttgactattttaagggagacaatgccaatattaaaaagtatatcattgatagtattaaacattctattacggaagcaaatgaaaacaagttaaaagactatattgatagagatggtaaagctaaagaacttccaatttcatatagcgcttttgataaatcgtttttatccgtttttgttgacagtaaacttttactatcaactccaattaattttaaatctgatgaagggctaaatccaagagaattagaaatttcacagacaataaaacttcttaatataatagcagaagaaatttatgtttcaaactttcaacctgaaattggagtggcaagaattgaaagtaaaatagttgacggaaaagatatggatatttccgataatcatttgatagcctatcgtatgagtaaagaggaaattttaataaattggttaagttatgtaagtgatgtaatcaataattattttagtaatacaggtaaaaaatttaataaaagttctttatttcaacaaaaatttgacgaacaactctggattaacataacaaacttcatacaaaatttaaaatcattgccactctggaaagatagaggaatggcgggaacaatttttgcaggaaaaaagaattatgattattggcgacaaattttcgaacatggtaaaactatagacaatgttcctgtattagcgaaaccaattaactatgttgaaatgatacaacctttagaggaagaataatattttacgctcaatatgctttctaattgtctctatattgaatagaattataaattattatttttactataaatactctcctgttaaagtgacaaaatagctaacagcataaactctttagcatgttttcaaaacttgaattttaaatagaaccaaaaccgaagaatatgctagcaactgaaattgaagagaaagctattttgattagaattaataaaacatttcaaaaatcaatggatagacaggcactttatgattatactcgtggaagatggaaagtaaatacaaatagggcaaagaatgccgaatatgcaattgctatttttagaggtattgttcaagaagtttatgaaattgaagattggcacaaagcaggaacaacagacagtagcagaaaaataaatgacaagccagaattgaattcaacaaaaagcttgattggacgttacgaatttacaggaaaacctgcaccgaaagaaattagagaaaaatatattcttaagtcggtcaaacattattttgttagaggaaattcaaatccaataaattatatcaatctttaaaaaagtataattttggttagggaatttttgggcgtttaaaaaagataataatttaaaatccctcaaaaacgcccaatccgaaaagagcaaagtcatattttaccggatcttgagggtccatttttctgagtttaagatcgagttctgttaaggcctttccatcattttgttttcgggttaggatccctaattttcgggctacattaccggaatgtacatcgagcggacacgataataatgaaggtgaaatggttttccaaatacctaaatcaacacctttggtatcctggcgtaccatccagcgcaggtacatgttgattctttttgctgcggaattgtttaatggatccgaaatatgtttttgagttcggggcaaatgatcaatctcaaagaatatttttttgaactcactgatgcttttctgtaagccgtctacttcttgatttttggcaaaaacagcttcaagacccttgtgatttttataaatgtgctgtaatccttttataaagccgctaaagtcttttccgttaaaagtacggtgtacaaagttttcaagacgctccagatcttcatcagtatgtgacatcacaaaatcataaggagtattacccattaattccatcatttgatgtgaatttttgataatcatcttgcgatttccccaggcaattgtggcactcaaaaaacctgcaatctcaatgtcttctttctgagaaaacaaatgtggaatttgcacaggatcactttcgataaaatcgagattgttgtattgggtgactttttcgtcaagaaattctttgagttctttttgtgtcataatgtaaaggaaagagataacctaattgttgaaggtttttaattactaattaatccatcaaccattactaactttctatccgccatattggctaattcttcattgtgagttacaattacaaaagtctgtccaaattcatcacgaagctgaaagaataactggtgtaaattttcggcagaatgggtgtccaaattcccggaaggttcatctgcaaaaataacatcgggtttgttgattagcgcccttgctacagcaactctttgctgttctcctcctgaaagttcattgggtttgtgatgaattctatgggaaagccctaagtaatctaaaagttttttggcctcgctttctacttcagtatttttttttccggcaatgaaagcaggaatacatacattttctaatgctgtaaattcaggtaaaagctgatgaaactgaaaaataaatcctaaattcagatttctgaattttgataatgctttatcactcagctctaaaatattctgaccgtttatggttaaggaagtttcggtttctaatcctgaaggcttgtcaagtgttcccagaatttgcaaaagagttgtttttcccgcaccggacgcacccacaatcgaaacaatttcaccttttttaatgtgcagatcgactccttttaaaacttctaatttgtcgtagaacttatgtatgttttttgcgtggatcattttgaaactgtttctacaaagaaacaaagattcttccgatatcaaaatgggttgtaacagaattttatgaagaaagctatttaaatgggtattgaaattttatgctacatttatgagaaattatttagcgagatgaaaacaaaaattgggatattagttttgataattatacttctggggctatttgttggtgtcaaagtatatgctgatgatcaatttgtggtgtataaagccgatcttaaagaacaagatttaagattatattggaagaatgataaaggaggaaattttggaagcatcgagaacctcaaactttggttggagaaaaacaaggcaacgctaaaatttgccatgaatggcggaatgtataaaagggataattcgccacaaggtctttatatcgaaaaacaagagattctggttgctttagataccttaaaagcagcgggtaatttctacttaaaaccaaatggtgttttttatctgacaacaaaaagaattgccagaatttgtaaaacagaagattttcgcaatgataatacaatagaatatgcaactcaatccggcccaatgttggttattgacggaaaaattcatcctgattttaataaagcttcgagtaatttgaatattcgaaatggagtagggattttaccagatggaaaagtaatttttgtattgtcgaaaaaggaaataaatttttatgattttgcaaattatttcaaaagcttaggttgtaaaaatgcgttgtatctggatggatttgtatcgcgtgcgtatgtgccttcagaaaattggattcagaccgacggaaattttggtgcgttatttgcagtaacagaaaaaaaagaataattaaaaggtttattatatgggaattaagaaacaaattaccattagaaaataagtttgttttaaagaattctttttaaattcgaatatctaaatacaatgaaaatgcaggaagccaaagtaatgaacgacgatagaacaaagaaactccttttgggtctggcattggatgcaattggaatgctgacttacagtatactaggttttgctgagcccgccgatttgatttgggcaccaatagcagcttttataatgaccaaaatgtatccgggaagagtagggaaagtagcgagtgttttaacttttatagaagaaatacttccgggaaccgatattattccatcctttaccataacctggatttatacttactttttttcaaaaagggggtaaagagtaatgcgaattaagatttttgattgctgatttcagatagttacgacattataaaatcgactatttcgttatttaacaacacgagatcaaaaatcgttaatcagcaatcttaaatcttttttaatcgattttacctcttttatggtaaattaagactgaggttttgaatctttgaacaaaaatcccagtcccatatttttaagcattttcttttcaaaattccaaaagaaacggaattgtccgaatatggtaccgataccaaccagtaaaacctgatagatcgggaaaataattaacagtcgtattagagtaaaccagcctccgaaatcctctttggtaatgcctagcaagacgcaaaaaggtttagacagccatgcagatgccgatcctgtgatggcaaaaacaattagtatgattatggcttgtacatttgaggtgatgccccaacgtttttttagtctgttcattctttatttataacgattacaaatataagaacattatcttataggaacatagcctccgagcttttgtttgtaagtattttgaaaataaatcatatagttataaataaggtaatttacttcgtaaccataatgaatcgttggctgataatcaattctcatttcatataaattcggactgtagcgctgtggctgtaaaacacgattgttccattcggttacgtacagattgtttttgttttcgagataacttaaagagtaataatttcgtggaagtgctcttgatgccagccaggtactaaagccgttatcgataatgatcacttcgtactctaaagaatcgttggcaattcgtaccgtatcgtttactgcggcagtagacttgccgcctgtatttgtagcagccgtattttttgaagctgtcgaacaggctattatggtaaacagaaggcctaatataaagagggattttttcataaattttgtttgagacttaaatttacgaataaatgaggagaggttttaggtatttaacagtttgtatagaaaggttctgagatgctaaggttctgagatgctaaggtttttggttttgatcaataaagaaaggttgtttgtgaggaaaggttctgaggtgctaaggttctgagatgctaagatttttggttttgatcaataaagaaaggttgtttgtgaggaaaggttctgaggtgctaaggttctgagatgctaagatttttggttttgatcaataaagaaaggttgtttgtgaggaaaggttctgaggtgctaagattctgagatnnnnnnnnnnnnnnnnnnnnnnnnnnnnnnnnnnnnnnnnnnnnnnnnnnnnnnnnnnnnnnnnnnnnnnnnnnnnnnnnnnnnnnnnnnnnnnnnnnnnagaaaggttgtttgtgaggaaaggttctgaggtgctaaggttctgagatgctaagatttttggttttgatcaataaaaaaaaggctgtttgcatagaaaggttctgagttactaaggttctgagacgctaaggtttttgattttcgtgaataaaaaaagctgtttgagttcaacaaacagcctttatatttttggtaaaaggtttaatacttaaatttaaagttaccatgggaatagcttagtgcctcagaaccttagcatcttagcaccttaaaaaaaaatcattttccaaacaatttccccaatagccctcctaatcctccacttttagtaagacttacagcatcggctacatctacttttccgtcattgttttggtccagaccgaattgcattccgtatttattaatagtgtccataataccggaagcttgtccgctatttcctgaaattgagcttataatatctgaaatattgaaactactgtcgttgggatcttttgctttgttgactaaagaattcaaaacctgcggaatcatacctgaagcgacaccggctgaatcggcgctgcttaatccgaatttttcaccaagactcccgcttaattgttgtgttatttgttgtacaacgggattagaactgtccagtttagaagttccgttaaataagccagccaattgttctgcacctccttctgaagcaattttttgcaatcctgaaaatattgaagagctagtttcctttataaccgcttcattatgctcatttgggacagcagcgttgtttaccactgcatctcctccgtattgttgtactaattgtgttaattgttcaaacatgatttaaagaatttaggttagaatttaaactcaaatttaatcaaaaaaagaaagggatttattaaacgatgttaataaatccctcctaattaatttatttttagtttattagctcagtatggaaatgatttgtgaagctaattctgtaccaattctgtcttgtgcttctcctgtggcagccccaatgtgaggagtcaatgagattttagtatgcattaaaatagccatttccggttttggttcgctttcaaaaacgtctaatccggcaaatgcaacttttcctgaatctaaagctttcactaaggctacttcgtcgataacaccaccacgagcgcagtttactattccaacaccatctttcataatagccagttctttttcgccaatgatgtaaccgtcctgagctggaacgtgtaaggtaatgaaatcagcttctttgaacaatgattctaaagattgagaaacgatagttgtagtgatcgactggccgtcaaaaaactccactttaacgtcaacagaaggaataaagctatcagcagcgattactctcattcctaaacctaaagccatttttgcagtagcctgaccaatacgcccaataccaacaataccaagagttttaccccttagttcagtaccattagcgtatgcttttttcaaaccgtcaaagtttgaatccccttcaagaggcatatttctgtttgaatcatgtaaaaaacgaacacctgaaaataagtgtccaaataccagttcggcaacagattctgatgaagaagccggagtattaatgacatgaattcctttgctttttgcgtaatcaacatcgatgttgtccataccaacaccaccacggccaataattttcaatcccgggcaggcatcaataatgtctttgcgaactttagtagcgcttcgtactaaaacgacatctacattattttcgtttacaaaattagctacttgttcctgagctacttttgttgtaataacttcaaaaccacctttttctaaagcaagaattccactttttgaaattccgtcgtttgctaatactttcatcttagtttatgtgtttatttgtttatttgtttaatcgtacagattagaagataaacataatattataattttttcttttttttttaggagctaatcccgctatccgttatgatcttttttgtttttaaagaaaaaacaaaaaaggatctccatttctatcggggctaggaatcctgtgttcaattcacatttttggtaaactgcaaactaaaaactgcgactgtaaactaaattttagtttccaaagctttcattacatctactaaaacctgaacgctttcgatagacatcgcattgtagattgaagctctgtaaccacccactgaacggtgacctggtaatcctgaaattccggcttctttccataaagcgtcaaaagtagcagtgtgatcggcattgtttaataagaaagtaacgttcattttagaacggtcttcaactgctgctgctcctttaaacaatggatttctgtcaatttcggcataaagtaattctgcttttgcattgtttagtttttcaactgcagcaattcctcctttttctttaatccattgtaaagttagtaacgaaacatacacagcaaaaacaggaggagtgttgtacatactctctgctttaatatgtttagcgtaatctaacatacttggaattgttcttccgtttttctctagtatttcttctttaatcacaaccaaagtggttccggcaggtcccatgtttttttgagcgccggcgtagattaagtcaaatttagagaaatccaattcacgtgaaaaaatatcagaactcatatcgcaaaccacaggaacatttgttgccgggaattctttcatttgagttccaaaaatagtgttgttgctggtacagtgaaagtaatcagcatcagttggtatttcgtatcctttcggaatatgattgtaattagcttcttttgaagaacctacgataacagtttctccaaaatattttgcttcttttatagcagcagttgcccaggttccggaatccagataagcggcttttccgttttctttcattaagttataaggggccattaagaaggctgtgcttgcaccaccttgtaaaaatagagcctgatacccttttccctgaagtcccaataattctaaagcaagggatcgagcttcctccataacagcaacgaagtctttacttcggtgcgaaatttcaagaatagataatcctgaatcattaaaatctaaaatggcttttgatgctttctcaaaaacttcctgaggtaaaatactaggtcctgcgctgtagttgtgttttttcatggtttttgttaatagtcgaaaaatttaaagacgcaaatttcggcaataggagctgaaaaagcgataaataattcgaaataattgaacatatttttaatttgttgttaacaaaaacgttatagtatctacattatctgcataatcccacaaacgtggtttttgggtttgcccaaaagaaatactgttttgagttaaatcattgctcacgatgcactgaatttgttcagcatcagcttctaaacgagtttgtaagtcttcgatgttttcataagattcataaaagacactcgaaataggagaggcgtaactcggatcttcttttagagttaaaaagccattgtctaaaagtttaaagttactcatcaaaaacacagctttattgtagtcgtaattgttagcgtatttttcgtaatgaataacatcctgatatttgaaaatagcctggaaaaatgcatcaaaagaatatcctttcggaacaaaaagtttagacacattgcggcatcccagtccaaaatatctgaaaatatcctcgcccaaagcttctagttcttcgtgagtttcttttccgtttaaaattgcaaccgaatttctgtttttgcgaatgatcgacggcttatctttaaagtaatattcaaaataacgtgccgtattgttgcttccggttgctataacgatatcaaaattttcgagtttaccttctacgaaagtgatcttatcttttagattttcatcgacaaaaatgaggtatttggctaaaaacggcaataaatgctgatcgtttgaagaagtttttattaaggccttatttccagtgattaaaaccgataaaaagtcatgaaatccaactaacggaatatttccggcaaggattaaagcaactgttttttcagttttatctgctttttcgaatgctgaactgtaagccgaaagccatttttcaatgttttcttccgttaaagcttctgcccatgaatgtattgcaaaatgcacctgttcaggagtataccatccattgtgtgattgagaaagagcaatcagttttatgaaatcatcaaaaaacaggtcgttacctaaaaccgattcatttcgtacgttttctgtttcagagaactgacttaaaaatcgacctagtgctataaaagactgttttttttcgttttgtaacataagtaatttgtttatgaaaggttttgattgtaattttgcacaaaaataaggataaataagtcgaaagtcaaaagtcatcaagtcaaaagcgagggatgtcttttttttgactttgcaactttaagacttttaactctaagactaataaaacaatggcaataattataactgacgaatgcataaactgtggggcttgcgaaccggaatgcccaaatacagcaatttatgaaggtgctgatgattggagatacaaagatggaaccagtctttccggaaaaataattttacctgacggaactgaggttgatgcagaagatgcacaaacaccaatttctgatgaggtgtattatatcgttcctggaaaatgtaccgagtgtaaaggttttcacgatgaacctcaatgtgctgccgtatgtccagttgattgttgtgtgccagatgataatcacgttgaagacgaagaaaccttgttgaacagacaagcgtttttacacggtgaataatgaaataatgatgtattagatataaacaaaaaatcctgagttaacgctcaggattttttgtttttgtttagtcagataagagctttttttgacttgtctgattgcataaagttcccaactgcttaaactgttgggggtagttgattttaaacacatagaaacatagatttgatatactcaaataaggcgttttacttattttaggcgcacagaggcgactatgcgtaagaaacgggtttctttttagattctttcatggcctcagaatctatgtttctatgtgttaaatgtttttttaatgggttaattacttaaaaattaaacccaagtcttgcatagtagtatgctccgctgaatcccatctgaacggcatcccagtaaccacctgcttcagtattgcctgtctcatcttgtttcgttgggtaaacattgaataagttgttgcttccaacgcttaatttcaggtttttagtcaattgatatccaacagttaagtcagtgattagtcttggattgtatacatcattttcatcagtataatctactaaaactactttgctgaatctggtgaatgcaataccggcatcaaatttatttttagcatagttaaggtttaagccaaatttgttatccggagctgatgatagtaggaatgctttttcacgttttccaaagaaagtgccttcgtctaaagttccattttttacattatcaattttcatgtcgttgatgtttccaaccaaagtcgcactaaacaaggattctccgaattttttcttccaggccaaaacgatatccaaaccgtgagtactggtgtctacaccattcacgaaaaactgagctttatcgacaccaaggtttaagggtttagcatcaaaatatccggtaagaacgatacggtcttttactttgatgtaatagccatcaactgttgcggtgaaatcgccaaaggtagccgtgaagcccaaagaggcatttaccgctttttcttcgtttagtttctgaattccaaaagccttggtaaccgggctgttgtttggagcaagtagcacttcggtagctcctcctgcattaaaatttgtaaaacgcaggttgtaataaatttgtgccagtgaaggagcacggaagcctgtacttacagatcctctgaagttaatatgctgtccggcttttactcttgcagctaattttccgtttaaggtacttccaaaatcactatagttttcaaaacgaaccgcaccgctcagtaaaaaagactctgttatgtcaagctcagcatcagtgtataaagataagttcgtacgacttttgtctaccgtatttgaagggctgtatcctggaaaaccttgtgaacctcccggtcttgaaatggttggagacgaagttggatctgtagggtcgtaatccggatttggaatagttggcgcgctttgggttgtagggttggttataggtcttccgttagtatcataagtcgcataagaaccttcttctcctgagaaaatagtaaatttttccgttctgtactctgctccaaaagcaaggtttaaaccgcttaagaccgaatcgtagtttttagaaaaatcaaaattggttgtattttgagtcagactgtgccctcctgcatcaaattctgttggagatttcccttctaaggaagcatttatagttcctttgatgtagtaatgaaaaaggtttttaccgtaagtattgcttaaatcgatgttccatccgctggccgttttagttctaaatcctgctgccagagaattgtctataatattagaagtaattctgggagtgtagccacccggataaacagactcgacaactctttctcctccgtttctggtaaaagcataggcatctgtatctctgtaatttcggcctccaaaagcataaaactgcgttttctcagataccggaagcgataaatttccgaataagttaaaaccttgaatagaagcatctccaaaaccttttctgaaatcataagcaggtcttagggttttgtttttgttgatgtattctgttgtaaaattggctgaacctcctttgtcaccaatcgcaacaccatagttagcggctacttttacagatccaccgtcaaacgattggtttttaccataagtatttccgtttccgttttggtccagtctgaagtttttggtatttggagttccatccaaaaaatcaccttttgcattggtattaaacgctccgtaggttacagatcccgttaattcgtcgacattgtcatttagtacaatattaataactccggcaatggcatccgaaccgtattgggcagcggcgccatctctaaggatttcaattcttttgatcgcagtagcaggtatggcatttaaatcagttcctgtgtttccacgtccgcgggtaccaaataaattgattaaggatgactgatgtcttctttttccgttaatcaaaaccaaagtctgatccggtcccagacctctcagcgaagcaggatcaacgtgatcggcaccatcagatccggattgtttgttggcattaaacgaaggagcaacatattgtaacaattgattgatctctattttaccgctttgtgtcgtgacatcttttacgctaataacgtcaatcggaacggccgaattcaccacggttctcttagtatttcttgatcctacgattacgacatcattcaggacctgacctccgttttcgtctaaaataacgtcagttttactatttgaagaggatttttctacattggtatagccaacgtagctaaaaattaagatggcaccttcttttacttttataaggtaacctccttcaaaattggtagatacgccgtttgtagttcctttttcaaggatattaactcccggaagcggattacctgatttatctctcacaactcctgatacttctttttgggcgaatagaaatgctgtgttgaacagtattattaataatgcaatctttttcatggttaattgagtttggtttattggtttttgttcgtttgttataaaagtaattatttttaacaaaaaattaataagaagtttattttttttaatgaggtgaccttaaaaaacattaatcgtcatttttacttcaattgcgagctattaaatcttatatttgcaaaattttaaagccaaaaaatactatttcggcacaagtacaaaaggaatacgaaaattataacctgttaaaaacgactttggtatactgaaaaaccggtataaaaaagactcgaaagaaaaaggtttacataaaaaacaaatagaatcaacagatgaaagcaggaattgtaggattaccaaatgttggaaaatcaacattatttaattgtttgtctaatgcaaaagcgcagagtgccaactttccgttttgtacaatcgaacccaatattggagttgtaaacgttccggatccaagaattaacaaactggaagaattagttaaaccagagcgtgtacaaatggcaactgtggatatcgttgatatcgcaggtttggtaaaaggtgctagtaaaggagaaggtcttggaaaccagtttttaggaaacattagagagtgtaatgctattattcacgttttacgctgttttgataacgataacatcgttcacgttgatggtaatgtaaacccaattcgtgataaagaaacgattgatattgaacttcagttgaaagatttggaaacaatcgagaaacgtttggagaaagtaaaacgcgccgctaaaaccggaaacaaagaagctcagacggaagaagctttgttaaaccgtatcagagaagcgttattgcaggcaaaatctgccagaactattattcctcaaagcaacgacgaagaagttttgatggaaggttttcaattgattacggctaagccggtattatacgtttgtaatgttgacgaaagttcagctgtaaacggaaataaatatgtagatcaggttcgtgaattggtaaaagacgaagaagctgaagttatcattctttcagtaggagcagaagcggatattacagaattagaaagctacgaagagcgtcaggttttccttgaagatatgggattgactgagccgggagcttctgtactaattcgtgcagcatacaaattattaaaacaacaaacttattttacagcaggtgtaaaagaagttcgtgcctggaccatcaatattggagctacagcaccacaagctgccggagttattcatactgattttgaaaaaggattcattcgtgccgaggtaatttcatacgaagattacgttcagtacggttctgaagcaaaagcaaaagaagcaggtaagttcaaagttgaaggaaaagaatatatcgtaaaagatggtgatgtaatgcatttccgtttcaacgtttaatcttttttagagaagatagaatagagaacaaagaagatagactaaaactgctggagcaattcagcagttttttttatgcacaaaagttattgttagttgtattttgaggttgaagaaagccattgtcagattgtacgaagtcgaagcttcgcatcgttttttatttcgagtctcgttcctcgaaataaaaaaaaatgaacttaaaaatccgtttaaatccgcgctttcgcgtgcgcgattctgtatagtcggtttgtaatttgtaagaagcaaaaaaaattggctcaaaaattggttacagaaaaatcaaccaattatcaatctaaaaataaccaataaaaatgctaaaaaaatctttcaaatttctgggctggacacttttcggaatctttacttttcttgctttatatgtgacagctgtattattgatctccagaattacagttaactccactatggacaaaattgacgaacaaaacgcaatcccgatttatattctttccaacggagtgcacacagatattgtggttccgatcgttagtgaagtcaaagattggagaaaggaaattcagtttgatcagacagaatccaacgatacattggcaaaatttgtagcttttggctggggtgataaaggtttttatctcgatacacctgaatggtcagatttaaaagccagtacggctttaaaagctatttttggtgtaagttcgtcagccatgcataccacattttttaagcaattacgcgaaggagaagattgcaaacgtattctggtttctaaagaaaactatcaaaaattagtaaactatatttcagagagttttaataatccggagaatcctgaatggattgaaggccatagttacgggaaaaaggatgctttttatgaggctaaaggaagttatagtctgttttatacgtgtaacacctgggcaaactgcgcgttaaaagcggcgaatcaaaaagcgagtttatggacggtttatgataaaggaatcttttgtcattataagtaaaaattaaagatgtattttaagaaataatcttttgacaaaaggattgataaaataaaaaggtacttttatgttttgggataaagcttgtttagtcctgaagagataataatgattatataaaagctatttgaaaaagctgtttttgaaattaaaccataacaaatatgaaaattgtagcctttggagggagtaacagtcagcattcgataaacaaacagctggcgacttatgcggcaagtttattcgacaatggaacagttgaggttttagatcttaatgattttgccatgcccttgttcagtgtcgatttagaaaaagaaattggtcagcatgagctggcaaaaacatttttgcaaaagattgaaaatgcagatcttttggtaatttctttggcagaaaacaacgggaattactctgcagctttcaagaatttgtttgattggagttcgaggatcatgaaagaaatttttcagcaaaaaccaatgcttttaatggctacttcgccgggagcaagaggaggagcttcggttttggaaatcgccaataacgctttgccaagatacggagcacaaattaaagctactttttcattgccggcatttaatgcgaattttgacttggaggaaaataaaatctcaaatgaagagttaaataaagaattaaaagacattattaagtccagtttctaatttatgatcccaaaaaagattgtccttgctgttttcttcctgagtttcatctttctgcctcgtgtcaacgcgcaaaagtacaatacgattgataatacggtgttaaagtatcctgctaattttacttcagtagaaagtctggcagaaagaatacaaaaagattttacttcagattatgataaagcgagggctatttacagctggattgctttaaacataaaatacgattacaaagcctatctgaatccgccaaaaccgcttcgatttacctatattaatgaagcggacaaacaagcgaaaattgcagttttaaaggaaaaaacatggcagaacactttcgaatcccgaaaagcggtttgtgaaggttttacacttttgtatcaggaattggcctctttaacggggttgaaatgtgaggtgatccgaggagattctaaacgatcgttgagtgatatcggacgtgaaaattcgttttccaatcattcctggaatatggttcaggtggatggaaaatggattttggttgatgtaacctgggggcagggatattatgacagtggcaaaaaagcggctgttagtcatttttcacccgtttattttgacactgatcccaaatacttttttgctaagcattttccggattccggaacttatctggggaaaaaattaaacaaagaggattttctgaacggaccattactttttgatgctgcaatagaaggagatcatgagattttggcaccggcttcaggaattattaaggctaatgaaggagacaaaatccggtttaaaataaagaatattgcaaagacagatcttttttattatttgaagaatggaaaacctgtcagaattgaagactctaaagcagtaaatggagctttagaatttgaagtcatttatgataaaaaaataggctcgtatattactttttttcttgttcgtgacggtataatgtcatttaagatactttcaaagtaaaacgaagcatgatctttgcttaaagagcttccttctttggttaaattggcgtatcttagccattacagttataaaattaatttaactgccggattatggaaacaacttatttgaaatcaattttagacaatgatttctataaatttacaatgcagcatgctgtaatcaaactttttccaaaggctcaggttcgttacagctttatcaacagaggaaatcattttttcccgcctggatttggagatttacttcgaaaatcggttgatgcaatggcagatttgcggttgacaaaagaagaaaaacaatatttgtggcagcattgttcttacctggatcccacttattttgattttttgcaaggctataactttgacccgtccgaggttcagattactcagacaggttctgagttaaaagtaactgttgagggctattggtatcgcactattttatgggaagtacccctgatgggcttgatttctgagctgttctataagactggtcaatccattcgactggacgatgaagctttaaaaagagtaaccaaagacaagattgataattacaataaaattggagtttcgattttagagtttggaacccgacgacgccattcgtatgatgtacatgccttggtgaatgagacacttcgaaaatttggttcgaatagttttataggaaccagtaacgttcattttgcaatgactaacaatatgaggccattgggtactcacgcccacgaatggtttatgtttcatgctgcccaatacggttttaaaatggctaatatgatggggctgggacattggacgcaggtatacgatggtgacctcggaattgctctgacggatacctatactacagcggtgttttttgaacaatttgataaaaagtactcgaaactttttgacggagtacgtcacgatagcggagatcctattgaatttgcagaaaaagtaatttcgcattatacccaaatgggaattgatccgaaatcgaaagtgatcgttttttcggattcattgaattatgagaaagtgaaaagaatagcggatttttgcagagataaaatcaaaatgtcattcggtgtcggaaccaattttaccaatgatgcgggtttgccttcaatgaatatggtgataaaactgacagaagtaaagttgaataatgaccagtggcaaggtgttgtaaaactttctgacgaaaaaaataaaaataccggaacgcctgaaatgattgctttggcaaaagaagtgctgggaatcaaatagtattttttaccaaaaagctgattttttatatttttggtttgcggattattttaaaatcaatgtaaatagggtttaaagctgttattattcgtaacaaaaaaaaaatacgctttcattttttgactataaatggtacattagccaaaaatccaattcactttatgctagagcaaaatcaatataccgaagataacattcgatcactcgattggaaagaacatatccgtatgcgtcccggaatgtatatcgggaaattgggagacggatcttcgcctgatgatggtatttatattcttctaaaagaggtactggacaactgtattgatgagtttgtaatgggctcagggaaaactattgaagtgactatcagagataaaacggtttcggttcgtgattacggacgtggaattccgttagggaaagtggtggatgtcgtttcaaaaatgaatacgggaggaaagtacgattcaaaagctttccagaaatcggttggtttgaatggtgtcggaacaaaagcggtaaatgcattgtcgaactattttcgtgtagaatcggttcgtgacgataaacaaaaaggggctgagttttctgcgggaaatctggttcttgaagaagatataattgaaacaacgaagcgaaaaggaacaaaagttacttttacgccggatgaatcgatttttaaaaattataaattccgtttagaatacgtaatcaaaatggtcaagaactattgttatctgaacaatggtttgacaattattttcaatggagaaaaatattattcagagaacggacttcgtgatttattagaagaaaccatcaacgaagaagatttagaataccctattatccatttaaaagatcatgatatcgaaattgctttaacgcacagtaaaacgcaatacagcgaggaatatcattcttttgttaacggacaaaacaccacacagggaggaactcacttagcggcctatagagaagctattgttaaaaccattcgtgaattttacaataaaaactttgaagcttctgatgttcgtaagtcgatagtgagtgcgattagtattaaagtgatggaaccggtttttgagtctcagaccaaaaccaaattaggttctactgatatgggttctgatgacggaacacctccggtttcggttcgtacttttgtaaatgattttatcaaaaacaaattagacagctatctacataaaaatccgtcaacggccgaagctttattgcgcaaaattctacaagcggagagagagcgtaaagaattatcaggaattcgtaaactagctacagatcgtgctaaaaaggcgaatcttcacaataaaaaattaagagattgccgtgcgcatcttcccgatacaaagaatccaagaaatctggaaagtacccttttcattacagagggagattcggcttccggatcgatcaccaaatcgcgtgatgtgaatacacaggcagttttcagtttgcgcggtaagcctttgaattcctatggaatgagcaagaaaattgtgtacgaaaatgaggaatttaacttattgcaggcagccctggatattgaagacggactggagaaattgcgttacaacaatatcgtgatcgcaaccgatgccgatgtcgacggtatgcacattcgtttgctgttgattacttttttccttcagttttttccggagttaatcaaagaaggacatttatatattttgcagacaccgcttttcagggttcgtaataaaaaagaaaccatctattgttattctgaagaagaacgaaaagacgcgattgaaaaactaaaaccaaaaccggaaatcacccgatttaaaggtctaggagagatttctccggacgagtttaaaaatttcatcggagacaccattcgtcttgacccaattatgatggataaaaatacctcaatcgagcaattattatctttttacatgggtaaaaatactccggacaggcaagagtttattatcaagaatttgaaagtggaattagatgcagttgaagaagaagtttaagatttaaataaaagatactattgtcagagggtcttcaaaataaagtcatttttcagcaagttgccgagttattgcaaaatgcgcgacaacaggttttacgtaccgtaaattctaccatgaccattacctattttgaaattggaagaataattgttgaagaagaacaaaatggaaaagacagagccgagtacggaaaacagcttttaaaaggcctttctaaacaattgacagaggaatttggtaagggattttctgttgaaagtttggatcgtatgcggaaattttatcaaatttattcaatttcgtcatcaccgatgacgaaattgcaaaatagaatttcccagtcactgactggggaattgaaaacaaagaaatcacagtcagttactgaggaatttcaatctcaaaaagtgcagtcattggcttcgtttttcaaattaacttggactcactatattttcttaatgcgaattgaagatgaaaaggaaagacgtttttatgaaattgaatctgaaaaatacaattggagtgttcgtgaattaaaacggcaatatgatacagcactttatacgagattagctttaagccgtgataaagaaggaatattagaactttcagaacaaggtcagattattgaaaagcccaaagatattattaaagatccttatatattggagtttttgggattgcctgaacttaatcaatattcagaatcacaactggaagaagagattatcaataaattagagcattttttattggaattgggacatggttttacttttgttgccagacaaaacagaatcacttttgacgataaacatttcagaattgatttggttttttataatcgaatattaagatgttttgtccttatagatttaaaaataggagagcttaaacatcaggatttagggcaaatgcaaatgtatgttaattactatgacagagaaatgcgtttggaagacgagaacaaaactattggaattgtactttgccagaataaaagcgaagctgtagtaaaatataccttgcccgagaacaatgagcaaatttttgccagtaaatacaaaacagtattaccaagtgtagaggttttaaaggaacttcttgaaagtaaataaatttgacaaatgaggaaagtatttttattgatagttgttttcgttttagtttcgtgtcagaataaaaaagcaaaggttttgcaagaaaacgaaggaattacaatggttaaatcagaaagtaaaataattaagaaaagagattttccgataaagaacttttcaaaaattgagttagtttcttattataacagaatttattgggatacattaaactataaaggcaaatttccttcctcaaaagtattagttgacaattacagattaacttttgacagtacgatgatagaggaaagagtgattttgaataaaagtcaggagacggaacttttaaatttaatggtttgtgatacctgtgttcctcaagaggtttcggcagcttgttataatccaaggcatatgattttattcagagataataaaaatagaattattggttataatgagttttgtgtaagttgtgttggaggcagaacatcatctaatctggataattttcaaaaatactgttattcagatatggaaacattgtttagaaagtttggaattaaactttttgtagactatgatgatgaaaagaaagaatacaagattttagaaaaaaaaggatatttaaaatattgatattaaatagaagtactgaaataaattcagcataaaaatgaaagacgaagaagacgataacatcattccgggcgacgacgagaataattcagaagaaaacctggataacattcaggaaggagatgacgatgaaattatcgatgtagatgccaaacattttgaaggagcgcatttttacgaaaatcaggaacaggaaggtgaagacgtaattacgaaagttaccggaatgtacaaggactggtttttggactatgcttcgtacgtaattctggaacgtgcagttcctgctatcgaggacggatttaaacccgttcagcgtcgtattatgcactctttaaaagagctggatgatggtcgttataacaaagtagccaatgttgttggtcacaccatgcagtatcacccacacggagatgcgagtattggtgacgctatggtacaaattggacaaaaagatttattgatcgattgtcagggtaactggggtaatattttaacaggtgacggagcagcagcttcgcgttatattgaagcacgtttgtctaaatttgctttagaggttttgtattctccaaaaattaccgattggggtgtttcctatgatggtcgtcgtgcagaaccgaataatcttccggtaaaatttccgttgcttttggcacagggagcagaagggattgcagtaggactttcgacaaaagttttgcctcacaacttcaacgaattaattgatgcttcaattaaaatcttaaaaggaagagcttttacgctgtatcctgattttatgacgcagggtattgctgacgtgtctaattataatgacggacttcgtggcggacgtgtgcgtgtgcgtgcgaaaattgctcagctggacaaaaatacactggtaatcacacaaattccgttttcgaccaatacctcgagtttaattgacagtattttgaaagccaacgaaaaaggtaaaatcaaaatcaagaaaattgaagacaataccgcggccgatgttgagattttaattcatctttttccgggagtttctccggataaaaccatagacgcgctgtttgcttttacagcttgtgaaacttctgtggcgcctttaggctgtgtgattgaagacaataagcctttgtttatcggggtttctgaaatgttgaaaatatcgactcacagaaccgtcgatttacttcgtcaggagctggaaattcagttagaggaattaaaaaataaatggcacttctcgactttagaaaaaatcttcattcgtgaagaaatgtacattgacttcaaattgtattcggatagagagtcgctttataaatatttatacgatcgttttgagccgttcaaaaaatcattcgtcagagaaatcaacgatgaagatttacagcgattgactcagataccgatgattcgtattacccgttttgactctgacaaggccgatgattttatcgcgaagttagaagatgaaatgaaggaggtagagtacaatctggaaaatttaacggattttgctattgcctacttcactaagttaaaagagaaatacggaaaaggccgcgagcgtcagactgaacttcgtgtttttgacaatgtagaggctacaaaagtggtcttgcgtaacaccaaactttttgtaaacagagaagaaggttttgtaggaaccagtttaaagaaagacgaatatgtagccgattgttcggatattgatgatgttattgtgttcctgcgcgatggtacaatgatgatttcaaaagtagatgccaaaacatttataggaaaagatattatacacgtcgctgtttttgacaagagcgataagcgtacgatttacaacatgatgtatcgtgatggtaaatccggaccttcgtatataaaacgttttaatgttaccggagttacacgtgataaagcgtatgatctgactaacgggacaaacggttcacaagtcgtttatttttcgcataatccgaatggagaagcagaggttgttactattttactgcgtcaaatcggaaccattaaaaaactgaaattcgatattgattttgctaaactggccatcaaaggacgtggatcaaaaggaaatttggtaaccaagtatccaatcaagaaaatagaattaaaagaaaaaggaatttcgactttactgccaagaaaagtttggtttgatgataccgttaaacgtttaaatgttgatgccagaggagaattgctgggagagtttaaaccaagcgataaaattctgatcataagtcaggctggtaaattgaaggtgattattccggaattatcgactcattttgaggaagatatgattgttttggaaaaatggaaacctaaaaaacctatttcggcgatctattacgatggagaaaaagaacgttatttcttaaaacgtttcctcgtggaaaatgagggtaaagaagaaagttttattacagaccatccgaactcgcaattagaaattgtatcaacagattaccgtccgttagcccagttggtttttgcaaaagtaaaaggagttcagaaagaagatttacatattgatgttgaagattttattgctgtaaaaggttttaaagcactcggaaatcaactgacgagtgataagctaaaacaagtaaacctgttagaaccgctgccttatgaagaaccggttgaagaagttccggagagggtaatcgcagacgatgatgacgccgttgaaacagaattagatgatgatggtcagataggtctcgttctcgaataatagaaagtaaaaaagaggaagtttcaaaattttggaacttcctctttctttttatgtgtataagatcattttttttataattaattttctcttttgttaagaagtcaactttcggaacgaaattaaccaaatccaattgctctgaaagagctttagcattagcatggtggtagcactatgaatgatgatgacaattatgggttacgccctgaaagggcaaaagcctgatcgcaatgaaaagcaccaggcatattttgtgtgagattttataagaatgggagtggtttttttataggattttgtaaggagtaaaaaaagcttttgccctttcagggcaatttagatcattaatttagttcatcgcgcgttgcgctatacttgtgctctcgggctttcagccctttttgatccaactttcggaacgaaattgatgtaaactggcagctctgaaagagcttcagtaataacatagtgcaaagcactatgaataataaaaaggtgttattgttttagccctgtaagggcgaaagctaaacgccaaagagagaaactcatttaatgtgatgaatgtttttttcggattcgcatattgataaattccacagcaagcgaaaacgaaatggcgaagtacaaataacctttcggtaccgctccaatatgctcacccgcaagtgccgcattcgataagtgcatactttccgtaatcagcataaaaccgatcaggatcaagaacgaaagccccagtatttgaatggacggattcttgttgacaaaatttccaacaggaaccgcaaataacatcataaccagtaccgaaatgactaccgccgtaatcatgattgttaaagcaccatgaacaccatttgtcataccgacagccgttaaaatcgagtcgacagaaaaaatcaaatcgatcagcaggatttgcataatgacattcgagaatgattttttggcaacagttttaagtgttttttcctcctcggcatgatggtccactttttcgctgatttctttagtactcttataaatcaggaacaaaccgcccagaaataaaatgactgcctgaccggtaaaatctccttcaaaccagccccaatgaatgctgaaaagagttgctttcatggcaatcagatacgaaattcccatcagcagagcgatacgcataaacatggccaaaaacaaaccaattcgggtggctttctttcgatcttcttcaggcaatttccccgtgacgatggatataaaaataatattgtcaatccccaggacaatttccagaaaagtcaatgtcagtaaggcaatccaggcatcggggtttagaaaaacttccatactaaaggtgttttataacatttaaatagattatttactcaactcttaccactgtaccacgttgtttttggtcagaacccaccattccaaattcaaaagtataagaatccttagaagtggttagaattttcatgctgatggctttttcttcagccatattttttggatgttttttttgtaaaatgtattcgcaatcacttacccatctgatggttgaagtgtctgttttaccttcaaaagtttcgatttcgatattgtctttacgttcaaaaacagtggtttttttgacgccatttacttcaaattcaaatttgaattttccgtttttaaaatctttgcagttgtgttccgcgttgtaacaagacattaaacctaataatggaagtaagaatataatttttttcataatgtaatttgttttttttaaggagctgattcctgctgtacgctatatcttttccgtctgccgcggcagacataaaaggatgccgcttccatcagggctagggcattagtatttataagaggttttttgaagtacaaagattatttatatttataataacaaaaggataaaaataaaaatagaactaaaaagtttaaaaaagtcagaaaaaacaagttccttcttctgttttcaaaaccttgttctaaagccagttttgttttgcagaatcggatgagaatccaccagcataatccgccaagatctgcatgaaattctatcatttcaatcgctttaattcatcatctgtaaagttcttgatttctttttctttggcaaacttttcggcgttgtaatttccggatttatttttcggaatcgataagctgtcccagtcgcccttctttaattgtttggcataaaaaacaatctgtccgatatgataaggataatgtgccagctgtctgttgatggcctcaataacggtatgaccttcgtttcggatgtaaatgatgtctgaaagttgttccgggtttaagctgtttaaggcattcagcaaacaatcccagcctttgttccagatcagcaggacttcttctttagattgcagatcattttcaaattccgaatcgcgattgcgccattctttttcgccatcagacgttaaaaaatcggtccaacgtgagagcatattgcctgaaacgtgttttacaatcgtagcaatgctgttggtatcttcattaagggtaacaaaaagctggtcgggttctaattgtgcaatggctttttctcccagcattttatagtacaaaaactgttttttaacgctttctaaataggaatcagttgctttcatagtgatgcatttggtttagcggaaatgagtttttattttttgtcacaaattcgtggcaaaaaactatacaattttgatatcgtatttgtctaatagccctacaataccctgagttgaaaattgtgcttttcgcatagggttaaattcaggatcaattttataattgtaggcagttctaaagtcgacgcctgccagttgtgtatcgttaaaaatagctccctcgagattgcaattgtcaaataaagcactggttagattgcatcctataaaagaaatctcgcgcaaagagcagttgataaatttagttttaggcattttcttgttcgaaaaaacagcataatctaaggtactttcttcaaaataaacctggaatagaaaatcatcacattcgttaaaagcaattccaagaagcttgcaatttttgaatgtagcatttttcagactggtaccggacaaacttgtcatcgacaaattgcaatcgataaactcacagtctaaaaaggtgttgtaagcaaaattgctattcgaaaaatcacaattcttaaaaacacaatcttcaaactcccgattgtttattttcttgtcaatataagtaactttttcgaaggttttttgaatgtgaattagactttccatgagtgttttttggattttcgtgagttaggtacgagaaggatgcaaattagtcgttaaataaacctttcataatgattttcaatccgtaaaaaatcaaaaacatagcgcttaaacaagccacaattccaattcccagaaccagataatgccagttggtatgctgattcataaaagcgttataaatgagcgacggcccaataaataataaaggcaatgaacccgataaatatttaattccttttcctaataattctttatttgttgccatttttttgttttcaggttttgagagtttcaggttttattgtttcaagtttcaagtttcaggttttagaactttacgattagacaggtataattttatttacatctgaccttttacatctcacatctcacaaataaacatttcgcataaaagattataattgtccacagcatttcgtacgctgccatatttttttaataattcactggcttgttcgtaggaaacaggaatttctcccataatcatttttacaccacgatctaccagtttgatgttactcaactgcatatcgaccattttattgccttttacttttccaagctgaatcattgcagcagtcgaaatcatattcagcactaatttttgagctgttccggctttcattctggagcttccggtgataaattccggacctacaaccacttcaaccggaaattgggcagtaagcgccaaaggacttcccgcattgttagtgatacagcccgtaaggatattattttgattacagctttctaaaccgccaatcacataaggcgtagttcctgaagccgcgataccaattactacatcgttttgatcaatatgattcgcctgtaaatcaatccaggcttgagttgcattgtcttcggcattttctacggcacgacgaatggcagtgtcgccaccggcaataattccgttaactaaatcaaaaggaacaccaaaagttggagggcattctgaagcatcaacaacacctaagcgtccggatgttcctgcacctatataaaataatcgaccgcctaattttaatttagaaactacctgtgctactaaagtttcaatttgcggaatcgctttttcgactgcatcaggaacagttttgtcttcctgattgatgttaatcagaagttcatggaccgacattttttctaaatgttcgtattttgaggactgttctgtagtttttgtaaaggtcattttttcgtgttaattgaactgggtcaaaattaatcttttttcttgcaatcccgaaatttggagcgtaaagtcatgaagatttagaatatttttttgttgtaatttctgatgaaatgattgctctcttgaacctttattaaaacaactaaaacattatatttgttaaataattaaaaatttggaatggatataattagctttttaacgagtatcgcaaaaatatcagtctttgtttcttttttactggccttctttttactcacagtgcaaacaaagaataaattgacaaaccgactgtttgctttctatctaatattttttgcccttgataacagtggtatttttattgatgatgagtttataaaagcccattttaatttagaatttttcagatggacggcttgttctctggtcttgccttttttctatctgtacgttttgtccgtttgtttcacggattttagattgagatcgaaacatttactacacgcaattccatttgtactcctgaatgtgttttatatgttcaggctttactttttaacgaacaccgaaaaaatggtgttttacaaccagcgtgatcagtcgccggagatgttctttttgtttctcgctttggccttgcaaattgtattttacagcattggagtagctttggtcttaaaaaaatacaaagcaatatatgaggaaaattataccaatcccagaagttctgtttttaaatggctgcttcagatagcggctatattctttgttttgtattatttatgtatcattaagaatgctttaagatatgtgaattacgattcgttatggatttggtctaatgtaatattacagtttatggttttggtaataacctgctggtttgtattaaaagccctgaatcatccggatctttttcggggtattgattctaaactacaattggccaaagatattcttcctaaacagaatactaatgtcggagaaaaggagcatcaaaatgaagtaatttcagatcaaattgcgacattgaagctctacatgaccgaaaaagaaccttttctggacccgtcattaaccattcaggaactttcgaatcagattaatattccggttcgggatttatcggttttaatcaatcatcatattgatcagcatttctttgattttgtaaacgaatatcgcattcaaaaagcaatgaatatactgaaagatcagtccaaaagtcagcttacggttttggaaattttgtatgaagtaggttttaattcaaaatctttttttaatacgtcttttaaaaaatatacaaatctaacccctacagcttatcggaacgcctcataataaaggctttgcataaagtactacttcgtgacgaaaaaagtcgaactcatttctgttgagaaaatgagttcgacttttttttgtcggtcgaattccgaaaatttctgcaacaactttgcttcataattaatcgaacaagttaaaaccagaaatcatgaaaaaagtttacctccttattattttagtattaccggtgttgggtttagcacaaacaactgcaaaattaaaaggaaaaatagccagtgaaactactgcattagaatgggcagatgtgtccgtattcaattcagaaggaaaaattattgaaggaacaaccagtaagccggacggttcttttgaacttaatttaaaagaaggcttttataaaataggaataagtctgctgggatttgttgattacgaaaagcagatcgcgattaaaaaagataccgatttagaaaccatagttttgaaagagaatactactcagctgggagaagtagtaattaaaactaaaaagaataccatcgagcaaaaaacagatcgtttggtgtacaatctcgaaaataatgtcacaaatgttggtggtgatgctttaagcgcgatcaatacggcacctggtgttgtggttcaaaaagagacgatcagtatattaggcaaagggacttctcgcgtgatgattgacggacgtatcgttgagttaacaggagaagaactaaacaactatttaaaatcgatatcagcagcagatattaagaacattgaaattatcagtacacctcccgcaaaatacgaagccgaaggaacgggaggacttattaatattgtattgaaaaaaggtacccgaaattcctggaagaacagttccatagcaacttatgatcagaataaatacggggctttgactttaagagataatttcttttacaacaaaaataagtttaggttttctgccagtattaatggaaagaaaggacataaatatgcggatgagtttctggatatgtattttcctgacggactttctgagatgattatcaatacaaaatttaccgatgagagtttgtccggaaaattagctttggattatgatttttcagatcgcataaccataggttttcaggttttaaaagacagaagtaatccggattttaagtcggatatcagaattaataattacaatactaaaaatgaactggacaattatatactgaacaatagttttgtggataagcagtccggcaaccagacttatcacgggcatttgattgcaaaattggattctttaggcagaaaattgtcttttgatgtggattattttaattacaattcaaaattcgaccgaaatgcgatcgcctacaattacagaccggatcattcatttgcagggattaatcagtcggcaagaaatatttccgatcaggatattgataactggagttttaaggcagatatggaacatccgcttacagcattcaatttgtcatatggtacaaaaatgagttttacaaacagtaagagttatgtactttactacaatacgattacagaaacaccggaattggatcccaatcagtccaaccgattcaggtatacggagaacaatcaggcagtgtacgttaacggagataaaaaactcagtgagaaatggaatcttcaattgggattgcgacttgaaaatactcaaacgagtggtttttcagaaaccttaaacgaggaaacaaaaaataattatttgagattatttcctacagtttatgtttcatacaaagaaaatgacggtaacaattttagttttaattatggaaaaagaatcagccgacctcagtttgatttgctgaatccttttcgtaattacattaacagcaacagttattctgaaggaaatccgtttttgagaccttcttttagtgataattttgaattgactcattcgtataaaggagttttgcgaaccaatgttttctttaacgtgatcaatgacggttatggcgtgatttttacctcaattcccgaaaccaatacgcaaattgtaacccgagagaattatttcagagatctaaagtatggggttggagaaagttattcggctgccttagcttcctggtggcagagtgaaaataccttgtactttttaggatcaaaaacgaagtttattgcagctattaatgccacaccgtcaaatagtctggaaatcaatttttcgacgaacaataccttttcattaggtaaaaattctaaacttcaaattgattttaattacaatacaccttctcgaagtggtttgtacaaaacggggtatatgtcgagttttgatattggttttaaacaggaggtgctgaataaatccttgcagattgcttttctggccaatgatatttttaatacctcttatttaaaagatttggtttcggttgtaaatggtgtaaagcaggtatacagtcagaacttctccaaccgatttttacgtttgtctgttgtttataattttgggaacaaaaaaataaacgtgaaacagcgtgattttggaaatcaggaggagaaaaatagaacggggaattaaaaataatccgtaaaatgattgctgatttttgattaacgattgtagatttcgaatttggtattgcttaataatactatcatctattttcccaggtttcataaatctagaatctaaaatctcttaatttaatgacgttggtaccgaacctacggctctttttattatgatgcttgctttctacgacggattaaaatccgtcgctacaatatgggtcgaactgatggttctttttattatgatatctttttctacgacggattttaatccgttgaaataaggtatgttcaaaacaagttccagcggaacgacacattccgcagcaattttaagccacgacaatgatttttgcttctttttgaaattaaattaacctgagttagcaataaaaacaatcaaacaattaagttccgaaggaaccacaaattttgtagcaacggattttaatccgttgaaaataagtcgcattcaaaataagttccagcggaacgacacattttacagcaatattaaaccgcaacaatgattttttcttctttttgcgattataatataaaggccaaaagaatccccaaaacaatcatagagactttggcaacattaaatttatgtccttcgctgctttcgaaaataatggtggacgagatgtgaaacagaattccgataacgatggctgtaatttcagtataatatttgcttagaacgggtaaatattcagaggcaacggtacccaatggtgtcataactgcgaaggcaagcatgaaagcaaaaatggcttttttattcagctctgcattgataaaaaaggtggtcagaattacggcaattggtaaatgatgaatagcaattccaagagccagaccatgatgatggcttaccggaaaaccttccagaaaagcatggatacacaagctggtaaagagcagccacggaatctgtgacatcttagcatgtccatgaacgtgaccgtgttcggctcccttagagaaaaactccagtataatctggaataaaattccaagcatgatgaagataccaatattgtgcttatgtgtttcataaacttcaggtaacaggtgcattacggttaaggacaataaaaatgaaccgctaaacgcaagcagcagctttagattggttttgctctttggttttaaaaacaaagccaccatataacctaaaagtacagagaataaggggagtagataattcattttttatggtttaaccgttgatttgtttaactgtttaatcgttttttgttcagcgattaaacagttaaacaaataaacgattaaacagtttatttaaaaatcatgattaatcgttcactttcggttttgtggaattttttgagtttataatctccaaaaatatccaacaggaaaattccggcttctgccattagttcttcaaaatcttttaaagttaaggcttttactttttctgtgaaatggtaattttgtccctggtcctcaaaatctatttctttaaaaatatgtccgtcctccacataccttttgattttgaaatcaattccgtccacactttttacttcttcaggtaccaaagtttcgataacctgagtaacgttcataaagtcgattaccgcaaaaccgtattcagataaactttctttaatggctttaagggtggttaaattatcgtcgtcactttcaaaatacccaaaactggtaaatagattaaagatcgcatcaaacttttcttcaaaaggttcacgcatatcgtgcactttaaaatgcagtgtttcgttactgttttttgtagcttctgtaatactgttttcggacaaatcggcacctaaaacattaaagcctagttggtttaaataaatagagtgacgcccttttccgcaagccaggtctagtactttcgctttttcaggcaaattcagataatgggttagattatccatgaaaatctgagcttcgcgataatttcggtctttataaagaatatggtaatagggagtatcaaaccatgaagtaaaccaattttcggtattacgttcctgatttggtgaggatgagtttgctgcttcagacatttattctatttcaattaattcaaagtccggcaaatttagtgtatttttgccgaaaaataactatttcgcaacgatacctctatgaatccttgcggaaatgcagcaggtgtacggatatgcagatgcagaggtcaacagcagtacatttgaaataattcaaaaataaagatggaagaaaattttagaatgatagccaaatgtttttttggttttgaagaaatattagagaatgaattgcgcactctaggtgctcaggatgtcgaaaaaggagtgcgaatggtaagctttaaaggagataaaggattcatgtataaagctaatttatcgcttcgtactgcacttaaagttctaaaacctatttattcgttcagagcaaataatgaacaggcactgtacaaaggaatttcgggagtaaactggtctaaattattaaatgccaatcagacttttgtaattgatgcgactgtacactccacttatttcaaccactctgaatttgtttctcaaaaatgtaaagatgctatcgtggatcagtttagggaaagaacaggacagcgtccgagtatcgataaagcttttccggatttacgaattaatgttcatatcgataaagaccaggtttctgttgcgttggatacttcagggaattcactgcatcagcgtggttaccgaactgcaacgaatattgcgccaatcaacgaagttttggctgcgggagtattactgttatcaggatgggaaggacagagtcattttgtagatccaatgtgtggttccggaacttttctggcagaggcagctatgatcgcctgcaatattccggcgaatattaatcgtaaagagtttgcattcgaaaaatggaaagattgggataacgatctttttgatcagattgtaaacagcttgatgaaaaaaacaaaagaatttcattacactataaaagggtttgataaagcgccaagtgctgtaaataaagccaaagacaacatccgaaacgccaacttggaagattatgttaccgtaagtgaggataacttttttgatagtgaaaaagcggtagaaggaaagttacacatggttttcaatccaccttacgatgagcgtctggatatccatatggaagaattctacaaaaatatcggagatactctaaagaaaagctacccgggtacaaacgcctggtttattacggccaatcttgaagctctgaaatttgtaggtttaaaaccatcccgaaaaattaaacttttcaacggaagtcttgaagcacgtttggtaaaatacgagatgtacgagggaagtaagagaacgaaatttcaggtctaaggttctaaggggctaagtccctaaggcactaagagatttggtttgagaaatttattttgtactattttttatttcaatattgaagtactaaaataaatcttagaacctcagagtcttagcgtcttagcacctcaaaaaaacaataataatttaaggttaaaaaaaaaggactaaggaatctacgaagtataatcttagaatcttagttcctcagaaccttagcaacttaaagaaaaatgacaaaactacaagtaagagcttttttataccaattaggatgtttcgcgattctatttattttagggagatttttagtagcttcttataccggattaacgggattttggattccaatgaccgcttttattgtcgctacattgatttcgcctaaatttcaatccgtaaagactaaagatggagagaagcttttcatgaaatggatttttataaaaggaattagagaaattggataattaatggattgtatatgaggataattggacttatcggcggaattagctgggtttctacagcagattattacaaacttataaatgaggggattaataatgagctgggagggcttaatttctcagagtgtctgatttattctttcaattatgccgacattaaaaagaataacgatgccaatgattgggaggcgacttttaatttgcttttaaaagggtgtcagtttcttaagcagggcggggcagaagctattgttttgtgtgcgaataccatgcatttgattgctgaccgacttgaaaaagcgattgatttgccaattattcacattgcgactgaaacggcattggcgattcagaagaaagaagtgaaaaaagtaggtttgatgggaacgaagtttaccatggaacttgatttttttaaagataaattagccgaaaaaggaatcgagactatcattcctaaaaatgatgccgaccgcgattttatgcacaccacaatctttgaagaattaggaaaaggtttggtgactgaggccactaaaaagcgctatctggaaattgccaatcaattgataaaagaaggcgctgaagggattgttttaggctgtaccgagattcccttggtgataaagccagaagatgttgctgtcccggtttttgatactactttaattcattctactgctgctattgaatttcaattgtcataaaaaggtagaaaaaaacagtttttaaaaaagataaattccaaatagtattatagattatttggaatttatcttttttaattcccgtagtatcagtttggacgaagccaaagctgtttgtctgagcggagtcgaagcagccagtcttagcaaagttgaagctgtctgtcttgacagagtcgaagctgtctgtctgatcggaatcggagctgtctgtctgagcggaatcggagctgtctgtctgagcggagtcgaagcagccagtcttagcaaagttgaagctgtctgtctgagcggagtcgaagctgtctgtctgagcggagtcgaagcagccagtcttgacagagttgaagcagccagtcttagcagagtcgaagctgtctgtttgggcagaatcggagctgtctgtctgagcggagtcgaagctgtctgtctgagcggagtcgaagacagattttagctttaaaaacaaattccaaacggtacctattgcacggtttggaatttggaatttttaaaatttggaatttattactttttaatagtttccttttttatggtttcaggaatgattgtcttcttcttataaagtggaatgaagtaagaaacggtatagttaaacccgattccgaagctgccatcatacgttctgttaaagcctggaatataaaggttgtcaaatccggaaggttttttattagaagccaacagtttaagctgaacgccaaaaccaacaaacacattgttaaaaacctttgcttttacacccattgccacttcaagccaacctgcagtaagaccattgtatttttgaccggaaacaattgccggctgttctccccagtatggatttgggttgtaaattttataggtattcaattgctgactaaaagtactgaaaccacctcgaagtccaatggtgattaaattttccatgtccaaccagttttggtacaaattgtagtcaaaacctcctttgatgtaagttccggttgttgttgaatttaatcggtcatcgtcggtagttttgtcttcaaaaccaagttcggcagccagatagtattttttggtcagacgaaaatccccagtaacttcaatacctttataattcttgtcatataatccacgggttaatttgtacaaatctacccccacacgaagtccgtaacgatccgttttgatgctatcctgtttagtttccttaacagctggtttagcagtttgggctttcggttttgtttttacgatctctttaggtgcagctgtatccgatgtttcctgagcctgacctaagaacattgaaaacagtaagcaaaaactataaaaatattttaatatgtgtttcattttcagattcaatgtgttttatgtctgtaaaaatttgttttatccagaacccatcgccagccgggtcgattaggtcgttgggttttagcggatcaagatcaaaaacggtcttaaatccacaggctcttgatacatatacattctcacgagtatagtaaaatgttatccgatcgctgtttctggtagcaggattagtgctctgagagttataaacaaaatcatatgtggtggtatttcggtctattctcaaaggtatcgagattgtattcgaattggttacatatcttaaaggattatcttcgtctgttatgcttttgttgaaaacaattcccttactttctccctctccggttacttttagatttattacgttttcttttacagtaggttcggcatctttataaaaggtaattaccagacgcggggtagtaggtgtactggcatcacaaatgtcatctttttcacagctggacaaaccaaaagtaaagattagtaaaagagagattatttttttcatttagataatttgttatcgaagttctaaaagcacaacattttcgacatggtgtgtttgtggaaacatatcaacaggtctgacacgggttactttgtatttttcgtccattaaagccaaatcacgtgcctgagttgctgaattacagctcacataaacgacttttttaggagcaatcttcaaaatttgatcaacaaccgcagcatgcataccatctcttggcggatcggtaataataacatccggttttccgtgctgagcgataaaggcttcgttgaaaacaactttcatgtcaccaacaaaaaactcacaattggtaatattattgcgctctgcatttgctttagcatctaaaatagcctcaggaacactttctacaccaattacttttttcgtcttttttgagacaaattgtgcaatagttcccgttccggtatacaagtcataaactgtttcgtttcctgtaagccctgcaaaatcacgtgttattttgtacaactcgtaggcttgatctgaattagtctggtagaaagatttagcgttgatgctaaatttcaaaccttccatttcttccagtatatagtctcttcctttgtatagtttaatatcctgatcgtaaatagtatcgttttgcttggcatttatcacgtattgtaacgaggtaatctgcgggaacttttcgtaaaggtgatccaaaatcagttcgcggtttttttgatcatcctcaaaaaactggatcaaaaccataatctcaccggtagatactgtacgaatcattaccgttctcaacaaaccggaatgctctcttggattgaagaaagccatgttatgttcgttagcaaaagctctaatctcatttctgatggcatttgaaggatcttcctgtaaatgacatttttggatgtccagaattttgtcccacattttcggaatatggaatcctaaagcatttcggtttcctaaatcctccgtacttccaatttctttctcggttaaccaacggctgttagaaaatgaaaattccattttgtttctgtagaaaaattgtttttcagaacccaaaatggtttcaaattcgggaagctctacttttccgatacgctgtaagtgattttttacttcattttgtttgtaatacagctgttggctgtatttcatattttgccatttgcatcctccacaaacaccaaaatgatcgcagattggctcaatacgatgctctgataattcgtgaaattttacggctttgccttcataataggcttttcttttcttaaaggtctgtacgtctactacatcgccaggaacgacattcggaataaagattacttttccgtcaggagcctttgctactgatactccttttgctcctgcatcaagaacctgaatttgatgaaagacaattttgtctgtattttttcttcccatagcgcaaaaataagggtttgtaaacttttataaatttaatttttaaaatattttatcaaattgcctaatttagtggtttaatcaagtttaaaagnnnnnnnnnntaactttgtttataacaagcgccccgaatactgccttttttataacctaattagtattgttgtcctttatgaagttgtatcataatctgtctcaaattggctttttaaagaaaagctatgctttcaaatttttgtttgttgcttttataggtattcatatccctctaataggaattttattttttgtgctgtattataatcacagtgtttcggcgacttcaattttgattttttctttggttatgacattattggcgacattagtgacgcttttagttttaaatcacttaataaaacccatttcaatagcctcaaaagccttagacgattacagacacaataggaaattatctattttgcctacagaatatagtgatgaggcaggtttactcttgtgtaatattcaggaatcgatctatgaatcagaaagttttatcaatgaaaaacaggatctgatttatatgctttcgcacgatttgaaaaatttcgcaggaaatcctcagggactggcgcgactcattataagtgaaaaaccatcagaatcagttcgacaattggcagaattgatttgtgaatctaccaatctacagtttcgatatattgaaaacttcatcaaattattacaagaacaagatcgggtagtgaaaggaaatttggagatcagaatgataaccttccctaatattttacctttcatcaatgaacaggttgaacagcgccttattgataagaatattaaattaagtctgaatttagagcttgttgaagcaaaactaagaattgacgaaggtttactggttcaggttttagtgaatttgattagcaatgccgttaaattctcttattttgatagtgaggttaaagtgagaatttataccgaagattcaaaattcatcgtaacagttacggacaatggaattggttttgataaaaatcagattgacgagctctttaaaaaattcacaaaaatgagtagattgggtaccgctaatgaatcttcaaccggaattggattgtatctctgtaaaaaaataattgagaagaataaaggtaaattaacagcaaccagtgagggcagaaataaaggtgctgaatttagaattgagtttgaattgtagtttgttgtttgtagtttttggtttgttgtttgttgtttattgttgatattctcttgagtgtaacgctcctccggagctgttttcttacaaggagaaattgtctgtagttatttcgctccttcggtgctcaattttaaaagctttttcacaagatttaaagaaaataaatcagcgtcaatcagcgttttcgctttagcgaatccgtctaatccgcgtttcaatttgcgatattcttatgcctaatttataatttatggctctgaacgaatcttattttcgagtaaaaaaatcaattcagaaccataaagttgtttttagtcaaataaatcagaagacaaataacgatcacctcgatcacaaatcacggcaacaataactcctgattccagttgttcagcaatttttaaggcaacagctacagatcctccgctgctcattccggcaaagacaccttcttcaagagcaagccttttagtcatttgtctggcttcttcttcgcttacatcgataacagtatctactttcgaggcatcaaaaatttttggcaaatattcctgcggccattttctaattcccggaatttgagacccatcactaggttgggctccaatgatttgaatgttagtgtttttctcttttaaataggtcgaagtcccaatgatggttcccgtagttcccattgctgaaacaaaatgggttaccgttccttccgtgtcgttccagatttccggacctgtggttttgtaatgtgctttccagttgtcatcgtttgcaaactgatttagcatcaaataaccgccctgagcgacctttttgtcggcatagtccctcgagccaataattccttcactagcgggcgttaaaatgactgtggcgccataagcacgcatcgtttgagttcgctcttttgtagaatcttcaggtaaaaccaattcgatttcaatttgaaacaattgtgcaatcattgccagagcaattcccgtatttccgctggtagcttcaatgagtttgtcgccttttttaatttcacctctttcaatagccgaagcaatcatattgtatgccgctctgtcttttacacttcctcctgggttattaccttcaagtttcagtaaaagctttacgtttttatttttaaccaaattgacggtttccatcaatggagtgtttccaattaggttaagcaatttctgtggacccattttatttagtttcttttattttaacttcagtcgtagtggtgtttaaaacgattgaatcttcagggatagatttggtgatccatgcatttccgcctacaatgctgttttttccaataatggtttcgcctcccaaaatagtagcattggcataaatgcaaacgtttgcttctacagtcgggtgtcttttggcgtttttcatttctttactaacgctcagagctcctaaagtaacaccctgataaatttttacatgttttttaattacagtagtttctccaattacaattcccgtagcgtgatcgataaaaaaaggagaagcaatctcagctccggcatgaatgtcggttcctgtaattcgatgtgcgtactcactcatcaatctcgagaaaagtaatagatccagacgatacaattcgtgacttagtcggtaaatggcgatcgcgtaaaatccgggatatcccaaataaacttcgtcaatgctgttcgatgccgggtcattttcaaggatgtattcggcgtcctgatttagtttttccagaactccgggcaatttttccaaaaaacgatcccacattgcatcacacgaattttcagattttttacaggccaaaacagcaatttctttgaaacgaatctctagttcttgaatactttcgtctaaagctgcattggaatcaaaaagagtgtaaaaaagcttctcggtaaaatcttctgttttggttttgatgccgtaatttatgcttgaatgactttttaaagcttttatattttgtatgatggaatcttttgtcaaaatggtaaaattgaatgaatacttagaaacgctaaaagtaaggtgttttttgtaaataaaggcatgaattctacaaagaaattttcttttgaaagtggtatttgtgataaataaaagaaatataaacggctgttttttttatgtaattcttaagctgttaaatgtgtaaattagcagttaaaaattgtgaaaatgaaaaacaactccacttttaaaagcgctatttctgatgtttcttttcctgaaagcgataaaatttatggaaaatcgatacatgaccctattttaggattgattattaaagatcatccctcttttagcgatgaggattgtattgccgtgaaagaattgaatgaataccgtcagaggtatatttcgaactatttatcaactgaaattggagtgctttcggatcttgaacaaagtgttttatctgcgttaaaagaagataagtcgattgttagtattgctgaagatgagccggaaaccagaaatttaggtcaaaaagtcgcagatcaggtggcggattttggcggaagctggacgtttattatttcttttttgatttttattgtagtttggattggagcgaatgtttttattttggtcaacaaaggttttgatccgtatccgtttattttactcaatttgattttgtcctgtatagctgcgttacaggcaccggtaatcatgatgagtcagaatcgtcaggaagagaaggatcgaaatcgagccaaaaaagattatatgatcaatcttaaatcggagttggagatcagaatgattcatgataaaatcgatcatttgatcatgcatcaacaacaggagctgatcgaaattcaaaaagttcaaatcgaaatgatgaacgatattttggataagatcaaaaaatgactcttacaaaagtaatgaggttaaaaaggatttgaaaggactgaaaaaaggttttatagttgaaagtgtttagggtaattgaattttaattttttgaagcaaagtgggtaatgattttagaaaaggagaggctttcagattagattgtgtttagaattgtattaaaaatctaatactaaaaaagtaagaatggaatagaaagggaggcttttgatttctagtgcaaaagaagcaagatttaatatacgacaataacactgttttttttaaattaggaaatttctttttctaaaatcaaaccagaattagtaaggacagttggacaggggtagtgttgctattttaaagtttcctatttttgaactttcaatacttataaaaaatgaaagcgtttaaaattttaataatgattcttgccatttcggttgcgttatacgagcaggtttcagcggaaaaaaacatctatattatggtaattgccattgcggttttcatgtatggaatgatgcagttgagtgcaaaaacacctagtaaaaaccaagataaagaagagcaggatgttgactaaaggagataaggtttcggtcttagacgaagcgataaacggaacagtagtttcggtgaaaaacaaggaagttttaattgaaaccgaggatggttttatgatgacattttttgtcaatgaactacttaaagtgcaatattccagtaatttaatgaattctatcaaaagaattgatttagatgagatttcaaaagagaaaacagagccaaaaccgcgaagttttgtgaaagaaaagaaagataaacgtgaaatttcggctcctgagtttgatttgcatatcgaaaaactggttcccaataaacgcggaatgtctaattatgatattttgactttacagaccgaaacagccaaaaggcatattgaatttgcgatcagaaatcgtattcctaaaattgtttttattcatggcgttggtgaaggaattctaaaagcggaacttgattttttattgggtcgttacgacggaatagattttcaggatgctaattatcaaaaatatggcttaggtgcaaccgaagtttattttaaacaaaatcagaaataagatcttatttctgtcgtaaaatattgggtttaggacataaaaaaaacgtccgtttttctttctgaatttctaatgaaatcagtttagaaaaacgtacgttttttgtaggaatgtaaacaggtgtgaacttgttttgaaattaccttttatggtgtagccgatacctcaagaattccgtaattgtaaatagttggtaatttaaaactactgttggctcttgtgagttttactcctttaagaacgatcttgtggaaataagtacttccaacaagagttgtactgacttcgataattccacttacattttgtacgccattatctgcagtccatatttcgtttacagttggagtagtcggtaaaggcgtagcgcaaaaataatcctgagttagagaagtaccattgtaagtgcgcaatagaactttattggttgaagaaccaattaagcctgttttaggctggttggaaggcgtaacaacattttcaagcagtttaggatcgatgctgtcaattgttaaagcgcttgaaggtgtgaaattaaataattgctttgaggttggacattgtctgacaactgtttggaaaacagtattcggagcattgtatgtggttttaaaaagaccaaatgagtattcggcctctacttgtgggcctgccggttttagaaaagtaatattctggaaaaagatattgtgattgtaacctgtaatggtagagcttccatcagtgttatcggttacagctgctgtaataacatctacaatttttccggcagtggcctgccattcctcagttacagccggtgttgttggagggattgcgccacaaatgttgtcaactcctataagaccgttataggctctgtatactactcggatatcggtattgttgatgtcaaaagttttaggtttgccaggttccgttgcatcattagtaaggctgttaggaggtaattgaattaaaagtgactcttgttttttaagtttgtatataatattattggttgttgtgttacaggttgcggctgtaatggaagggtcactaaaatcaattgtatctactactaaatccccatcgtcgcagccgtttaataaaagcgctaagaagagaaggcttgcatattttttcatcgtaattttatttgaggtcaaaaatagtgaaaaatttggcaaatgatattctagatttgacaattgatatttcataactttgtattaatgaaaaaagtatacctcgataacgcctctacaaccgctatgcgccctgaagtgattcaggaaatgttgaaagtaatgactgaagattttggaaatccctcttctacacacagtttcggaagaaacggaaagaccattttagagctttccagaaaaagtattgcgaaatatttaaattgtacggcacaggagattattttcacctcaggaggaactgaggctgataattggattcttcgttcggcggtggaagatcttaaagcagaacgcattattacaaccagaatcgagcatcatgccgtattgcataccgcattggttttagaatctgaatataacgttcaggtggattacgtaaatgtaaatcctgatggaggtatagatttaactcatttatccaatttattagccgaagacaaaaagacaattgtcagtttgatgcatgtaaacaacgaaaccggagccattttggatctggaaagagttggtgtaatttgtaagcagtataatgctttgtttcattcggatactgttcagtctgttggaaaaacggagatcgatctgcaaaaaatccctgttgattttattgtagcaagtgcgcataaatttcacggtccaaaaggagttgggtttgcatttgttcgaaaaaattcaggattacagcctttgatttttggaggagagcaggaaaaaggcttgcgtgccggtacagaagccgtgcatcagattgccggaatggcaaaagcattgtctctttcgtatgagaatttagatgctgaaagaaattatattttcggcttgaaaacctatcttatggagcaatttgaagctcattttccgggtttcagaatcaatggaaagaaggatgatttttacaatatcatcaatgttattctgcctttctcagcagataaaacttcgatgcttttgtttagtttagatatgaaaggaattgctgtttccagaggcagtgcctgtcagtcagggagtgtgaaaccgtcacatgttttgaaagaaatgctttcggagactgatttaaaattaccaaatctccgaatttcatttagtcatttcaataccaaggaagatattgactggttgattgagagtttaaaaggtctttagagggactaaggttttgaggtatacaggagcaaaggtctgtagggacaagtaaaatgtacattgtgagtgatgtaatctgaaacctgaaacttgaaacctgaaacttgaaacttgaaacctgaaactatttaaagttgttaaatgcagattttaagcaatctaaaatctgcaatctaaaatctacaattacttacgaatcacttttacctgtgaatcattagtgagttttatgattgttgaaggttttccggcaatcctgtcgtgatacagatttactacatagtcaacgcctttcacaatttccggattgatgtctttgaagccaataggagtcggctgtcccgaaatattagctgaagtcgaaaccagtggttttttcattcgttccaataatttaaaacagaacggttcttttaccagacgaacagcaagcgaattgtcggcagctatgatatttggagcgacattacgtggttcatccagaattaaagtggttggtttttcagataaatctaaaatttgccaggctacttcagggatgtttttaaatacattgtacatcattttttcgccattcatcaatacaatcatactttgtgtttcagcacgttgtttgagtttgtatattttggcaacagcctcaggatttgttgcgtcacagccaattccccacacggtatcagtagggtagagtatgattcctccttcttttatgacttcgtacgctttgattatttcttcgttcatattacaagtcaattattttgtatgatggaattcctttaattttaaacttatgatgatacatataaagattgattagtctttctgaaataaaaccaaaaattcgggcctgataagcgtcttccgggattgtaactctggattcaagttcaaacagaattgaaaaaagccaggtatagtaagtgtcaaatttttcttttgaggtgaccatcatatttcccatgtggaaaagggttccttcgtctaaaaattgggtaatactgtcgttatattccggatatttttctaaaatgatctgtttggttaaatcccaatcttcttttcggtgatcctcacagtagttctgggttaaggaaccatttttgaatttataaggtcggcaaagaattacgtcatattctgaaagaatagagagtatttttttttctaatttttcagaagatgtattatacagctttgttctcttaaaatcttcggttgtaatttttttctgtgcagagggttttaggttgtaccagtcgttgtaaaagttaagatatcttctgtaatgacaaatacctacgtaatccgcttctttttcatttttccatacccagtaggcagcagtgagctcgcagtaattactgtttttacttccgatattgtcctgcgtgttgtctcttaggatagtagttgtgatagattcatttgttccaacttgcataggaaccagaagattgtttgataataccggattttctttatgggttacgataaaaatcttaatcattgtttaattcttttttagatcttgttagagccatagcaattacctgatgcatgtcataatatttatattctgataatcttcctccaaatatcacattttcttcttttaaagatagtttatggtattcttcaaatagcgtttggtttttgtcatcgtttataggatagaacgcttcattagaaggattccattcgcaagggtattcctttgtaataatggttttcttttgctttccaaattcaaaatgtttgtgctcaattattctggtaaagccatagcttgcatcattataattaatgcctgcatttccttgaaaattctctgtgtccagcacttcgttctcaaaacgcaatgatctgtattccaaaagccctaatttataatcgaagtactcgtcaattttcccggaataaaccactttgttggcaattgagttgaatttttttctgtctgaaaaataatctgtgttagttattacttcaattccttccagtaatccttcaattaatttattataaccgccaataggaattccctgataagtatcgttaaaataattgttgtcaaaagtgaatcgaacagggagtctttttatgatgaaagcgggtaattcagttgcctttcttccccattgtttttcagtatattctttaataagattatggtatatgtcctttccgacaaggcttagcgcttgttcttcaagattttgagggttttttgtgccataagtggttatttgttcatcaattttggctttggcctcctgaggagttttggtgccccaaagttgataaaaagtattcatgttaaaaggtaaattatacaatttccctttagaaaaggacatcggagaataaataaagttattaaaatcaacaaattgattgacataatcccatatcgctttatcgttggtatgaaagatatgcgggccatatttgtgaacgttaattccttcaatattttcgcaatatatatttcctcctatatgttctcttttgtcaattaccaggcattttttgcctgcttttgttgcttcatgtgcgaacacacttccaaagagtcctgatccgattattaaatagtcatattgctttttcatgatgcaaaagtagagattaattagtaaattgcaacaaattacaaaagtaaaaatggcaggaaaaatacaagtaggatatctggtttcgtatgattatgagttgttaaaaacatcacttccaacagtgtataacgatgcagatgcggtttttgtcgccattgataaaaatagaaatacctggaatggcggaagctttacgatcgatgattctttttttgaatggattaaggattttgacgttgataagaaggtagtgatttatgaagatgatttttatgttccaaccttaactacaatggaatgtgaaatcagagagcgaaaaatgctcgctgaaaaaatgggaattgggaactggattgttcaggtagattgcgacgagtattttgttgactttaaaaagtttgtttcagatttaagacgatacgattcttatttaattaatcccgaaaaacatcctatacagatatgtgctttctgggttatgctttataaatatacagatcagggtattttatatgtagataaaccgctgaaagcaatttttgcgacaaattatcctaattataaaagcggacgcagaatcaaagagcgtcagatttataccaataatattgtcttgcatgaatccttgtcaagaacagaagccgatttgcgttttaagcttgacaattgggggcataatgttgatgtagataagggatttttggataaatggcttgttgtgaatgaaaacaattataaagagtacaaagatttttactatttacagcctaaaagatggaagaaattaggattcttctcgactaaaagtatccctcagataaaagagattattgagaaagaaaaaagactgaatgtgcctaagttcaatctctattttaaaaatttcggacagtggctgaaatattcattgaagaaaaaaaaggcataaggtaatttttagttcgtttttgctctcatatttgatttttcttaattattaaggttatttttgcttccttccatttacctcttagaattgcagactattgaactgctttttgatgctttggtttgaataaaataaatcattgagcattggaaatgggtaataaattaatatcaaagttatagttaatgatctcaaaatttagattttcaacagcagtaaaaagttccagagatatcctgacttttattaaaaattttaatacttcaggcgagttgtttgggaatggagaccgaaatgttattaaattgtttgatcttgaggagaaaaaaatcaacattaaatcgtttaaagttccaaatctaattaataaagtggcttaccgttattttagaaaatcaaaggcaagacgttcgtacgaatatgctaccattttattagaaaaaggtattggaactccacagcccatagcgtttttagagaactttaattttgtaggactgagagacagttattatgcaagtgagcatttgacaactgatttaacctatagagaacttgtagaaattccggattacccggatcgtgacaatatcttaagacaatttacaaggtttagttttggtcttcataagaaaggaattgaatttttggatcactcacctggaaatacgcttattaagaagaagcaagatggaaattacgaattctttttggtcgatttaaaccgaatggagtttcatgaatcaatgagttttgaaatgcgtatgaaaaacttatgtcgtctgactcctttaaaagagatggtggcggttatgagtaatgagtatgcaaagttttataaagaagaatcggagcaaagaatatttgaaactttgtggaaatataccgctgattttcaggagaagttttacaggaaaaagcgcttaaaaaagaagtttaagttttggaagaagtaattcggaaaagctctttatagcggataaagacactgtatgcatttagataacatatcgtgattcctttgactccgtctaaaaagcccaaacgaactaaaaactgatacaaaaaagtataaacaggatggaaaatcatcaatagacgagatgatttctgtccttttttttgtttttcattggcctttaaaaccccgtaactgtacatttttgctttgtagtcagaaaaagaagtatacgagaaatgaatgatcttattctttaaagttgaaatagacccgttcacgatcagtttttcatgtaccattctgtcctgattgtatcgacagttagtcttattgaaaagtctgaaaattttatccgtttgccagccgctaaaatgaagcttacggctttggaacataaaagttctgtaaatgaaataggcacttgctgcatctttttgactgatggtggctgcgatttccagttttagttccggagttaatctttcatcggcatcgatgaataagatccaggagttttttgcctgatcaatcgcaaaattacgttgtgaagtgtaattaacgaacggattctggattacttttacgtttttaaaagattcaattatgtccagcgtccgatcggtactgtacgagtctaccacaataatttcatcggcaaaatcgatatcttccagtaatgattttatatgcccttcttcattaagcgtaataatcaaaacggatagtttttccctgtcagtagtattcataagttcttcactcattttcaatttttatactcctgaaaataagtatccagtttttcaagcattaaacttaaagggtactcatcgtagtactgaaaagtatgatcttttatgtattgctcggtgtgttgcttgtatatttccggttttaaatcttttaagtgaatagagaagttcttggcttcattttcaaatatttgccaggtctcttttctaacagatggtgtgaatatggagaaggttggaatttcaagtgctttggccatattcacggctccaccttcatttccaatcagcatttcgcattgtgaaagcaaagccagaaaaggtcttagttcggtgcagtacaaatcaaagacgatgtgttttttagtttcggcactacaatggttgtatacttcaagggcctgttctttttgatctggaatataattgaaaataatagtggcattggttttggcaactgtaaaatcaatgattttagccattccttctaaaggatacgtcttgtaaacttcgcttcccaaaattccaaacatgattaatggcttttccgtatcaacctgatagcttttcagaagttttttagcatcatcaatttcagattctttcaaaaatatttttggttttacatctgtaatcttttcaggaataaacggttttagaagcatcaaacgattttcaatggccaatccgtgttctgattctacggcatctaaacgttcataagtgtaattgtagaatattttggtgtaccatttacgatatgaaaccttatattttgcacccgaaaacaacgtaattaaattagtttccagcttagaatagacgtcaataacagcatcgtatttattacgtcggatttgaaaaataaatttaaacagagaaggagttgattttctaaccttgttggataaaggaataatgttatcaatattcttgttctcttttagtacatcgacagaatttgggtaacacatataatcgataatcgaatccgggtatttggtttttagattattacagattatggtgctcgttaatacatctccaattcttttttgctgaatgactaatattctcatttatataaaattcaatttgtgggctaaattagtaataattttataaagtgtgcaagcgcacgattaagataaggtaactaaaataaaaagccgtatttttgtaaaaaaataaattccccccaataaaatgcaaattagtggtcttattattactttcaatgaagagaaaaacattggtaaatgtatagatgctttactaagagtttgtgacgaagtaattgtagtagattcgtttagcaaagattgtactgttgaaattgccagagaaaaaggcgcaatagtgattgaacagacctttttgggcgacggcccgcaacgtacacatggtcttccttattgtaaaaatgactggattttaaatttagatgctgatgagattctggccgaagatgctgaaaaatttataacagataaaaaatatcttgaaggaaattatgatgcttttagcttcagagtaaaaaattttctaggcgataaacttatcgatttttcgggctggtatccggatcaaaaagtccgtttttttaataaacaaacagcacatccgtctgattctaaggtgcatcagaagataattactcaaaatgagaaaaaggtctccgtacacctcttacactatggttgggattctttagatcaaattattgcaaaaaagaatcaatattccggttggcatgcgcaacaactgtttgatcaggggaaaagaataaccgcaattaagccggttgttaatggggctgttgcgtttatcagatgctacttttttaagaaaggtatttttaatggtatagacggcttgtcgatagcgatgattcagagtttcttttcttatatgaaatatgctaagcttttaaaacttcaaaagaagctaaaataaaatctgataaaaacggaggtgctaatctcaattacagtatcggtttttaaaatactaacatagtctttcacgctgtgttatttcttagcttttcgattgttgcatgtgtcagatatatttttcgcaatatagttagtggtaattttgctttaaaaattagcgaacgtagtttttttcttatatttgaaaacaaataacatcaggttttatttaacaataacaaggttttttgtttcatttctttttttttgcttaaaagtgttttttttgtgaaaaataatactattaatgatagatttgctaaaaaaatagagaatgtcaaagctgccaattttaatgtatcataatgttgtggaagacgaagcaaagtctgtggatttaagtgtttctgtagcaaaattagaatcacaatttaaatttttacacgataacaattacacgacatttcattttaaagatctggaaaatttcaaagaacttccttcaaaaagcatcataatcacttttgatgatgttaccgagtgccagttgttgtatgctgtgcctttgcttgaaaaataccaattaaaagcctctttttttataccattttcttacgttgggaattttgattactggatcgaagggaaagaaaagatcatgagtgtcgaacagctaaaagggttaaatcctgatcttattgagctggggtatcactcttttgaacataaaagatacagttcgttgtctaaagaagaattagaagctgattttgcgaagtctaataaatttattttagataatcagttagatataaaacctgttctggcgtatccttttggaaactatgccaagaaacattctgagtttgctgtttttgaaaatatgatgcgtgataacggtatacaatacggtttgagaataggcaacagagtaaataattttccctttaaaaataactatttggtaaagagaatagatataaaaggggaagatagtttgtttagatttaaattaaaattgaaaataggtaagcttaaattattttaaaaaatgctatggaaattagtggattagtaataacgtataatgaagaaaaaaacattggcaaatgtatagatgcgctgttcagagtttgtaacgaagtaattgttgtagattcgttaagtacagataatacagtgaaaattgccgaagaaaaaggggctaaggttgttttgcagagctttttaggcgacggacctcagagaattcacggtcttccttattgtaaaaatgactggattttaaatttagatgctgatgagattctggccgaagatgctgaaaaatttatattatcgggccaatacgaaaaacagaattttgatgtgtatgccttttcgctgtacaattatatgggctgtaagctgattaattttgcaggttggtaccctgataaaacttcacgattttttaacaaacaaaccgcttctccttcaaaagatagtgtacatcaaaaagtttgtggtactaataagacccacttaaaagttcatattcatcattacgcctgggactgtttcggacaatttatcagtaagaaaaatttatattctacctggcatgcccagcagctttacgatcagaataaaagggtaaacagctttaaaccgatattaaacgggacagtttcttttattagatgttatttttttaaaaaaggctttttacatggtttagacggtttcaccttttcaatgactcaggctttcttttcctatatgaaatatgccaagcttttgaaacttcaaaaacagaataaataaaaaaaaatagttttaaaaaaaataaagcggaatgatcactcattccgctttatttttttatagagacttaaaattaaacagcaacatcgtactcacgaagtgcattgtttaatgaagttttcaaatctgttgatggtttacgagtaccaatgattaatgcacatggtacctgaaattcacctgcagcgaattttttagtgtaacttcccggaatcacaacagaacgggcaggaacgaaacctttcatttcaacaggttcgtcacctgttacatcgataatttttgtggaagcagtcaaacaaacattagcaccaagaaccgcttcttttcctacgtggactccttctactacaatacaacgagaaccaataaaagcaccatcttcaataataaccggagcagcttgcaatggctctaaaacaccaccaataccaacacctccgcttaagtgaacatttttgccaatttgggcacagcttccaacagttgcccatgtatcaaccatggtaccttcatcaacataagcaccaatgtttacataacttggcatcaaaatgacaccgcttgaaatataagctccataacgggctacagcattaggtactacacgaattcctttttcagcataaccttttttcagcaacattttgtcgtggtattcgaaaataccggattcccatgtttccattttttgaatcgggaaatacattacaacagctttcttaacccattcgtttacctgccacttgtcaccaacaggttcagcgcaacgtaattttcctgcatcaatcaattcaataacctccctgatagcatcagtagtggttgtttcttgtaataaagctctgttttcccaagcttgttctattatagtctgtaaagaattcataagttttaatttttggcaaagataaggtatttgcggaaaagcagaaaagtaaagctattgtaaaatgttacaagtgtaactttttgtttgtattttgataaataaaacaaggcttatggaaaacgcaagaatgcggttaatctataaacgcttttttttgatggtaaaacatgataaaaatcagattttgcgtttttacttctcattaatttcgcggtataattcccgaaagatatagagaggaattgcgaaataccattccaaaacaaaaatatttaatcagtaaaaaatgaatcaagaaaatcaactccgaacgcctgttacagtaatcgataaagaagtcacgtgggataaaacacaagtgattatgagtaaaacaaatgcttttggtattattgagtatgccaacgaagtatttgtggatgtatgcggttatgaagattatgagttaatggggcagccacacaacatcatacgtcatccggatatgccgagagttatttttaaagtactttgggaaaatcttaaaaacggaagaaactttcatgctattgttaagaatttagcaaagtcagggcgttactattgggttattaccgattttgagattgcaaaagacgagaacggagttattgtgaattattttggaagacgacaagcggttccgcaggaggtaatagccttgcatattgagccattgtataaaaaactgttgcaaattgaagcagcgagcggtatggagtttagtgagaagtaccttattggatttctggaggaaaagaagaggacttatgttgaatatattaaggagttaatttacgagcatgagaaatctcaggcaaagtttgctcaatatgaagtgcaggaaaatgatgaagaggaggaaagaggtttttttagaagactgtttaacagatagaagttatttttttaggttttgaatatttggaaaaaaatccgtttttaacaaaagctcagaacggattttttgaatttaatattgaagagggaatgaattactcttttgaggtacattaaattataaaaacatcaattcaaaaagctttatctttgtattgtaaatgaaagtattatggaagcaattagattagagtttcaaccggaaataaaagaaaaaatattaaaattgttaagttcattctcttcagaggaacttaaaataattccggaagattcaggatttgaagaggataagaggaaattgagagagagagctgaaaaaattgcaaacggaacagcacaatatagcacgtttgaagaattagatgttttacttgaagagactattaaaaaatatgaaagttaatttaacgattgagtttaattatgatttgaatgatatcgtgcattttatttcaaaagataaaccaattgcagcaagaaattttaaaaatgaattagtaaaaaagttgaagaaggatttggtaaatccttttcattttaaaaaatctgtatattttgatgatgaaaattttagagattatatttttaaaggatacactacaatcgtgaaaattgactctaagaatgaaattgttcatgttattggtattttaaagcatcgagcactattttaaattaagtttgcaaaaaaaaaataaaatgccaagaattctttctatagactacggacaaaaacgtaccggaattgcggttactgatgaaatgcagatcattgcttcaggtttaacaacaataccaaccaatacccttattgattttctgaaagattattttgcaaaagaaaaggtcgaagccgttttaattggcgagcccaagcaaatgaatggtcagccatcagagagtgcttcagttattaaaggatttgtaactcattttaccaatattttccctgatatgaaagtagttcgtgtcgacgaacgttttacttcgaaaatggcctttcaaacgatgatcgatagcggactcagcaagaaacagcgtcagaacaaaggtttgatcgatgaaatttcggctacaattatgcttcaggactatctttcgtcaaaacgtttttagcacccaatcttttagctttttattttttagaaaaacataacttttatcatgcaattttagtttttttttgcaattataaaaagtacctttgcactttaaaaataatactgttatgtctgacaaaacaatacgttctaatagtgaagtagtgcttattggagcgggaattatgagtgccactcttggagtaattttgaaagaattacaacctgatataaaaattgaaatttacgaaagattagatgttgccgccgcagaaagttcagatgcatggaataatgcaggaacagggcactctgccttttgtgaattaaattacactcctgaaaaggctgacggaagtattgatccgaaaaaagcgataagtattgctgaatcttttgagatttcacgccagttttggtcctatttagtagaacagaaaaaggtaccatctcctgataattttattaaaagtgttcctcacatgagttttgtttggggagataaaaatgtagagtatcttaaaaaaagatttgaagcattacaaaacaaccctattttttctcaaatggaatttagttccgattttgagcagttaaataaatggatgccgcttgttatggaaggccgagatgctaacgagaaactggcagctactcatatggaaataggtaccgatgtgaattttggggccttaaccagaagcatgttcaattatttagcgacacttgatggtgtttctttacactttaatcatgaagttaaaaaactaaaacaacgtgaagataaatcatggcgtatcaaaatcaccgatcttgctaccggtgatgtgagaaaagcttatactaagtttgtatttattggagcgggtggaggttcattgcctttattagaaaaagcaaatgtaccggaaggagatggttacggaggttttccggtaagcggtcaatggttaaaatgtaccaatccggaggtaattgcaaaacatcaggcaaaagtttacggaaaagcaagcgttggagcacctccaatgtctgtaccacatattgatacccgtgtaattgatggcgaaaaagcattgcttttcggtccgtttgccggattttcaacacgctttttgaagaatggttcttacttagatttaccattatctataaaaccgaacaacttaattccaatgttgtcagcaggatatcataatattcctttgactaaatatttgattgagcaggtacgtcagtctcctaaagacagaatgaaagcattacgcgagtatttgccaacagcacgttctaaagactggaaactggaaagagccggacaacgtgttcaggtaattaaaaaagatgaaaacggtggtggggttttagagtttggtaccgaagtaattagtacacacgacggaagcctggcggtgttattgggagcttctcctggagcgtcaactgcagtgggcattatggttgatttgatcagcagatgttttgccaatcaggtgaaaacaccggaatggcagtcaaaaatgaaaacgatgatcccttcttacggtcagactttaaatgataaaccggaacttttagccgagctcagaaaacatacttctgaagttttaaaactaaaaaatagttaaactcagatcctagaataaataacaaatccagatgaattaatctggatttgttgctttaaattcctttgttatttttagaatcttctcagccagattgctcatccagatcaattgctcgattaccatttgagcttcctgcattttggcttgtcgggtttccttgtccaaatcatcatctgcggccaaacgtttaaaattaacacgtttgagttcttcaaattgtaaggtcacgtcttccttatcaaaataagtatcatttatgatcttttcatttcttaaaacagcaatggcgtgatccagattggaaagaattgttttaatgatgtaattaaaagattccgaagcagaagtagtctgatgcgactgtatgtaagttgataacgaggccaacgctgataatatagaatgatttaataccaccagtttattaaccaatggaagtgttttttgcttcgatttaggctcctgcatcattcgctggaaggaagtcatgaggttaccaacctcaacaaaagcgttttttctggataatcggtatgaagtaggaacttcgccttttttattgtagaaatcggcaatctcctttaggtaatttcgattggcccgaatcgaattttcaatatgtattggagtattgataaattcccaggccggccataaaaactgattggctaaaaatgctaaaatggctcccgcaagcgaatcgagaattctaaattgaattacctcgaccacatttggagctaaaattccataaataaaaaccacgtacatcgtaacaaatgttgcgcttattttgtaattaatttgcgtaaacgaaataccaagaagcatgcaaacaatagagaatatactcaatacaacgtgattttggaccaaagaaacgattccgaatgctaacaatcctcctaaaatagtaccgaaaattcgattataggagcgctctttcgttaagccgtaacccgggcgcatgatcaccacaatggtcagtaaaatccaatacacgttttgaaacggaagaaattttccaatcacaaaaccaattaaaatagtcgtagtcaatcgtatggaatgcctgaaaatagaagaagagtaggataaattctcaatcaaagtgcgtaatggataatattgaggcgttaggaacttctccagttctttatccttatcctttaatttataagattgcatcgcaagtgaaaaagcacgctggatggttttgatttttcccacctgatttttagcgtacttcagcatattggtcaacatcagtacgccttcggcagcttcttctttgcctaaagttttttcatagtcaaaaatggcaaactccaatgcatccagctcattctttaaatcattcttatctacatatacactgatattgtgtacgtttttagataacttttttaaggtagaagctaatttataagctacattctgataggttcgcagcacatccggatgcgcggaaaatttttcgtgaatcttgttatggtcgaatgaggtgtataaagccagttcctgaatttcgaccaaagtaataaaaaccagtaacatttttcgattttgactggtagctcccgaagtattttgattgccaataagcatttttctcaaatcctcatgaatcaggttgagttctacctgaacgcttaattgtttttcgatgatggctgttcggttggcttcgggactccacaaatcccctctgagttttaaatatttggctgttagttttatgccttcagcaatttgaagttcaacatatttgtacggctgtacaaagtggaaaacaagtgatacaatcagatataaaattccaccgataaaaataaaacccgaatactcaaaagcctcccagccttcatgcaaatgaccaaacgataaggaaatcgacaacaaagcagaaaacgaaaccagagtagcacgctgaccatatactgaaatcattgaacataaaaacagtaaaaagcctaaaaaaggataaaacaaaaaggggtacggataagcaagatttaccagcaagtttactccagaaacgataaaggaagccactataagtccttttatcttatggcttaaagaactcggaatatcactgggatacgtataaaaagcccccaaagcgatagtaaaaccgatttcgaagtgtccgagaaagttcaaaattaagacaggaacaaccgaagcaatagttacttttgaggcatttaaaaaagaagtactgttggtaaatttcgagatacgatcaaacatatatggaggtttacaaacaaaggtaagaattgtacgaattaatttggcataattatggatgagtttttggcgagattgcaaaaaatgacacataatagccctttcgaattattcattgactattttttactatttttgccagctgaattaagagaattaaattcagtgttttttcagtagataatacattaaaatattacaaatgattttaccaattgtaggatatggtgatcctgttttaagaaaagtgggtgaggcaattacgccagattatccaaacctaaaagaaacaatagctaacatgtatgaaaccatgtacaacgctttaggggttggacttgctgcgcctcaggtaggagtgcctattcgtttgtttgttattgatacaactccttttagtgatgatgaggatctttcttcaagtgagcaggaagatttaaaaggtttcaaaaaaacttttatcaatgctaagattttgaaagaagaaggtgaggagtggagttttaatgaaggttgtttgagtattccggacgttcgcgaagatgtttacagaaagcctaccgttacaattgaatattgtgaggaagatttcgtaatgaaaaccgaagtttttgacgggttggtagccagagtaattcagcacgaatacgatcatattgaaggagttttgtttacagataaaatctcttctctaaagaaacgtctgatccagaaaaaattaaaaaacattacagaaggcaaaacatttcaggaatacagaatgaaattttttgctgcaaaaaaaggaagatagtattctaaagtatgaatttagaatcaaagaaatataataaatcaaattcttaatactaattttaataaacatgaatttagagaaaattttagccatttctgggaaaccaggtttatatgtattgaaagtgcaaactcgtacaggttttgtggcagaatcattagcagatggaaaaaaaatcacagtaaacttaaaaagtaatgtaagtttattatcagagatttcaatttatacttacgaaggcgaaaaaccattaacagaagtaatgcaacgcattgcaactaaagaaaataaagggcaggctatttcgcacaaagaagacaatgctacattattggcttattttaaagaaattttacctgaatatgacgaagaaagagtttatccttcagatattaaaaaagtattaaactggtacaacactcttcagtctaaaggtttggtaacagatttagctccggctcctgttgaagctgaagaagaagctccggttgctgaagaaaaaccaaaaaaagctcctgctgctaaaaaagcaaaagctaaaaaagaagaatagtagttcacagcattcttttaaggttctaaggcactaagtttctaagtgactaagttcgttttagattattaaaaaaatggttaggctcagcatcttagaacttcagaacctaaatacttcaaaatatattaatcctgttgagatgttttcttgacaggattttttacttttacaccaatcgttacaacccggataaaatttcaaaaatgagcaaagaacttcaacttaaggccttcgaaagattattaattattatggatgaacttcgtgagcaatgcccgtgggataaaaaacaaactttgcaaacacttaggcatcttaccattgaagaaacctatgagctgggtgacgctattttagacaatgatttaaatgaagtaaaaaaagaactgggtgatttgctgttgcatattgttttttatgcgaaaataggctctgaaaccaacgattttgacatggcagatgtgtgtaacgaaatctgtgataaactcattcatcgtcatcctcatatctacagtgataccaaagtcaaagacgaagaagaagtaaaacaaaactgggaaaagttaaagctgaaagaaggtaaaaaatcagttttagaaggagttccgagaagtttgccggcattagtaaaagccagtcgaattcaggataaagtaaaaggagttggttttgactgggaagaaccgcatcaggtttgggacaaagtacaggaagaactggaagaattgcaagttgaagtaaaagcaggtgatcaggacaaaatagaggccgaatttggagatgttttattctctatgatcaattacgcccgttttttaaatgtaaatcccgaagatgctttggagcgtaccaataaaaaatttatcagtcgttttcagtatctggaaagcaaagcagcagagatgggaaaacctttgatggatatgacgttggctgaaatggatgttttttggaacgaagctaaaaagcagtaattattctgccagcttttttaaggctttgatgtcctgaagtttgatttttttacctactaattcaattaaatttagtttgttaaaatcggataacaatcggatacagctttctgtggccgtacctatgatacccgccagttcttctcttgtaagctgaactttcagggtattgtccgcattctcaccaaaatcgtcatgcaactgcagtaaagtttcggctaaacgctgtttcaccgttttttgtaccaatgcaattttatcgttttcagattcttttaaatcctcacaaaccgactgcattaaattcatagagaactgattgttgttattgaaaaagtgaagaatttcggctttcggaataaaacatacttccatatcagcaacggctttggctgttaagttagcaggttcattgctgatcatagaacgctgacctaaaagttctcctgattttaccagttttacaatttgatcttttccgttggcacttaatttagagagttttccaacaccgtcttttacacaataaactccattcgtaacttcaccttcttcaaaaagagcatcccctttttttatcgtgtaagttgttttgctattcgccagtttcacaacttcgtctttattgagtgcttttagagaagaaagctgtcttacgatacattggtcacatttattcatagcaaaaatatttattgcaaaattaaccaatattcgctttcgcagctagtgttcgggctgaaaaaaaacataaaaaatctgacaacgctatttgaaggatttatttcattaaattagaaacggatttctttgtagtatgataaatgtcatatttaaagtcacctcttattttgaatatttgtggtatcaaaaaaaaacaaattatgagtgaacaaagttgttttcattgcggacttacgattcctaaaaatgaagtaatcaattttgatgaaaagaagttttgctgcgccggttgtaaaacggtttacgaaatttttagtcttcatgatttaaccggttattatgattttgaaaatgcacccggcgctactccacaggatatcacaggtaaatatgactttttagacaatgaggctattctttcgaaagtattagaatttcaggaaggaaataccgctattgtttctttaaacattccttatattcattgcagttcctgcatttggattttagagaatttaaacaaaattcaacctggcataagtctttctcaggtgaatttcccggagaaaagggttcggattacttttaattcagataccgtttctttgaaaactatcgtttatatgcttagttctataggctatgaaccttatattagtctggaaaattatgaaacgggtaaaaataatgtcgacagaagcttaacgtataaattaggtgttgcctttttttgcttcggaaacatcatgttactatcatttccggaatattttgaaataaaagaattctggctggacaattacaaacctttttttagaatcctgatttttattttggctttgcccagctttttgtactcggcaagtggttactatgtttctgcttacaagagtatcaaatcgggaatgctgaatatcgatattccaattgcattgggaattattgtaatgtttgttcgaagtacttttgatatcgtcatgaattatggatcaggtttctttgatagcttgacaggactggtttttttcatgttgttaggaaagatgtttcagattaaaacctatagttttttaagtttcgaaagagacttcaaatcctattttccaattgctgtgaccagaattaattcagatacttcagaagaaagtattcctgtttacgatgttttaaaaggaaacagattgctcattcgaaatcaggagcttattcctgttgatggaattctgattagtgaaaaggcagaaatcgattatagttttgtgacaggagaagcggttccaatcactaagaaatcgggagataaagtttttgccggagggaaacatattgggaaagtgatcgaaatggaagtgttgcattcggtgtcacaaagttatctgacacaattatggagtaatgaaatcttccagaaaaaagtgcttcaaaagcacaaaacaataaccgatgcgattagtaggtattttacaccattgttattattagttgcttttgcaggctttggttattggatttttattgatgccaataccgcttttaatgtctttactgcggttctgattgttgcctgtccatgtgcattggcacttactgcaccttttacgtttggtaatatactgcgaatcatgggcaagcaaaaaatgtatctcaaaaatgcgttagtaattgagcagctggcaaaagtggatacgattgtttttgacaaaaccggaacgatcaccactaacaagaaatcgaatattgtgtatgagggaaactctctctctgaagaaaattatatacttattaaaaatgtgcttcgtgcttctaatcaccctttgagccgaatgttgtatgatttcctgccggattcagatagaataaaaattaatgattttcaggaaattaccggaaaaggaattcaggcttctacagagaatgctacaatcaaaattggatccgcagcctttgttgatagccctgtaacggaactgtctgaaatcgaaaaaacaggtcttcatattagaatcgatggtacttattatggaaaatttacattccagaataaatatagggatggtttggaaaaacttttttcaacattgagtcatgagtatcaaataaaggtgctttcaggtgataatgatggagaacgcgctactttggaagccattttgcccaaaaacacagaattgatttttaatcagaagccggagcaaaagttagaatttatcaaaaaattgcaagacgaaggttgtaatgtgatgatggttggagacggtttaaacgatgcaggtgctttggcacaaagtaatgttggaatttcgatctctgaaaatgtcaatgttttctctcctgcctgcgatgctatactggatgcaagtgagttttcgagactaaattattttttaaaattatcacacaaatcgattacaattattaaaatgagttttgtcttgtcactgctgtataatattgtcggactctctttcgcaattacaggaaatttgttgccattggttgcggctattattatgcctttaagcacaattacgattgtaagttttgttacgattatgtctaactacttcagtggtagtagtttaaaatcattataaataattctaaaacttttttttatatttttaacataagaacatcacttatgataattatcatattttgccaggcaataagcgagtaattttgttagtataaaacgtaaggtatgagtgttatttatctattaatttcagtaagtattttcgtagcaattggattctttgttgcttttattgtagctgttaaatcaggacaatacgatgacgattatacaccctcagtcagaatgctttttgatgatgagaccaaaattaccagcccaaagaacaatttaccaataaaagaaaaacaagtataattatggaaatggaacagttttattacgacaacaaaattgttaaaaaattcatttacgccactatcctgtttggagtagtggggatgttagtagggcttacccttgcggtgatgtacctttttcccaacataactgatgggatctcctggcttagttatgggcgactacggcctttgcacaccaatgcggtaatttttgccttcgttgggaatgccttttttgcagggatgtattattcgctgcagcgtttgctaaaagccagaatgttcagcgactttttaagtaatctgcatttttggggctggcagcttatcattgtcgccgcagcaatcaccttgcctttagggtatacttcttcaaaagaatatgctgaattagaatggccaatagatattgcgattgcccttatttgggtggtaatggggataaatatgattggtaccatgctgcgtcgtagagaacgtcatttatatgtagccatttggttttatctggcgacatttgttacagtagcagtgttgcatattttcaataacattgagattccggtttcagctttaaaaagctactctgtttacgcaggggttcaggatgctctagttcagtggtggtatggccacaatgcagttgcatttttccttacaacgccgtttttaggactcatgtattactttgttccaaaagtagccaatcgtccggtatattcttatagattatcaattatccatttctggtcgctgatttttatttatatctgggcaggtccgcaccacttattgtattcagctttgccaaactgggcgcaaaatttaggagttgctttttcagtaatgcttattgctccatcttggggaggtatgatcaacggacttttaaccttgagaggagcgtgggacaaagtgcgcgaagaaccagttttgaaattctttgtagtagccattaccggatacggaatggccacttttgaaggaccaatgctttctttaaaaaatgtaaatgctattgcgcactatacagactggatcgttgcacacgtacacgtaggagctttagcctggaacggtttcatgtcgtttggtattatttattggttgattccgagaatgaccaaatcggatttgttttctaaaaaattagccaatttccatttctggattggaactttaggaatcattatttacacaattccattgtatgtagcaggttttcaacaagcttcgatgtggaaacaatttaaccctgatggaactttagtttatggtaacttccttgaaaccgttacggctattatgccaatgtattggatgagggccattggaggtagtttgtatctgattggaatgctgacattggtttacaatattattatgaccgtaaaagcgggtaatacaatcgaagacgaattagctcaggctccggcattacaaagaatcagcagtggaagacttaatggggagaaatttcatacctggttggagagaaaaccaattcagttaaccattttagctacgattgctattttaattggaggtgtcattcagattgtaccaactattatggtgaaatctaatattccgacgatctctagcgtgaaaccttactcccctttagaacttgaaggacgtgacttgtacataagagaaggttgcgtgggatgtcattcacaatctgttcgtccgttcagaagcgaagtagagcgttacggaccacaatcaaaagctggagagtttgtatacgatcatccctttttatggggttcaaaacgtacaggtcccgatttgttgagagtaggtggaaaatataatgacaactggcattttaaccatatgtggaatccacaaagtacttcagcaggatcaatcatgccgggttacaaatggttgtttgataatgaagcaatggatgtttctctgactcagaagaaaatgaaggcaatggtgtcactgggggttccttataccgaggaagaaattaaaaatgctcctcaaactttaagaacacaggcgatggcgattgagaaaagtctggaaaacgatcctgattatgtaaaaagttacgaggacagtaagaaaaaagcaattgcaaaaggcgaaaaattcgttccgatgaacgagagagaaattgtcgctctaattgcttacatacaaagacttggaacggacatcaaagtaaaacaaccttctaaataacagcatcatgtttgaacaaataaaacacaatatggagaacatcgcgggtattgaaatttacccgatactttctctgttgattttctttttcttctttgtaggcctgggtttttgggtgttctcctataagaaagaaaaaatagaggagatgagtgcgatacctttggatgaagggcttattataatttcaaaagataaataaaaatgaaaagatttttcccagtatatgtaagagtgccattgatttttttcattgtctttgcgctcatggaatattttatagattcaggtgacaggccggcttttattaagtatccaatggtttccatttttctctttgtttttctgtttattctgattgcaatcgaaataacgttgagtgctgttaatagggtaatgtaccaattaatgtcgccggaagaaaaagcaaaagctgatcatgaaaagagtttaagtctgaccgaaagtacctggtacaaagagttgatgcataaactaactcaaacagaacccattgaaaaagaaggcgatttgttgatggatcatgattatgacggtatcaaagagttagataataatttaccgccttggtgggtatacctattctacatctgtatcatatttggtgtaatctatgtagctcgttacgatgtttttggaggagacgatcaggaaactgagctgagaaaagaaatggctcaggccaaaatagatgtcgaggaatatcttaaaacggctcctgatttgatggatgaaaaaacggttgtcttactaacagatgatgcaagtttagcagccggtaaggagatcttcatgaccaattgtgcagcctgtcacagagcagacggtggtggtcaaattggaccaaatctaacggatgatcactggattctaggaggcgggattaaagaaattttccatacgattaccaatggaggacgtgacggaaaaggaatggtttcctggaaaaccaatgggatgaagccaaaggaaattcaaaaagtagcaagttacattttgtctttacaaggcagtaatccaaaagatccaaaagaaccggaaggagaagtttgggtagaccaaagcgcccctaaaaaaggcgacacagcagataaaacaaaagatagtacagaagttaaaaaataataccatgtcaaatttaccagacgaagcttttagagataccattggaaccattgatgaaggcggtaagagaaagtttatttttcctaaaaaaccgtctggtaaattctacgaataccgaaagattgtcagttatgttttgttggccattttaatcgcgaatccgtttataaaagtaaatggaaaccagtttatgatgttcaacattatcgaacgacgtttcaatatattcggatttccattctggccacaggatttttatctcttcgtgatctcaatgttggtgggtgttgtattcatcatcttgtttacggtcgtttttggaaggattttttgcggatggatttgtccacagactatttttcttgagatggtcttcaggcgaatcgaatattggatcgacggagaccgcggtgcacaaatgcgactcgcaaaacaggaatggaatgcggagaaaatccgaaaaagaaccactaaatggactctctttttcctgatttctttcggaattgccaatgtgtttttagcctatctggtgggaagtgacgaacttttcctgatggtagagcaaggaccaattcagcaagccagtaattttatcgcattgcttatctttacaggagtcttctattttgtatttgtctggttccgcgagcaggtctgtatcattgcctgtccttatgggcgtttgcagggagtactgctggacaataagtcaatcaatgtggcgtatgattttgtacgtggagagaaggaggaaggccgagctaaattcagtaaaaaagaagacagagccttaaccggaaaaggagattgtatcgattgtcatcaatgcgtacacgtttgcccgatgggtatcgacattagaaacggaacacagctggaatgtaccaactgtacagcctgtattgatgaatgtgactccatcatggaaaatgttggtttacctaaaggacttattcgttacgcgtctgaagacgagatcgagaaaaaagcgccttttaagttcaccacaagaatgaaaggatatacagccgttttgtttattctgttaagtgtgtttgttggaatgttgtttttaagaaccgatgttcaggctattattctacgtttaccaggacagctttttcagcacaaaggagataaaattagtaatgtgtatacctataaaattgtcaataagacgatgaaagattataaggatatccattttgagctaattgatcaaaaaggtgaaattaaaaatgtgggaaaaacgcattttaaagtaggtaaagaaggcatttcgcaaggaacattgttcatagaaatagacgaagtacttctggagagcgataaaacgaaagttaaaataggggtttataatggcaaagagctgctggaaaccactacgactaactttttaggtccgcgaagttttaattaaaaaatacaattatgaaaataaattggggtaccggaattgtcattgcatttgcattgtttatgagttttattttatattttgtttttgaagtacaatcgaatagtaaatacgacaatgatttggttgtcgaagaatactataagcatgattcgcattttcaggaagaaatggcacgtattcaaaacgctcaggatttacagcaaaaaccttcaattgcctatcacaaagatggagttgaaattgtttttcctgccgtttttgaaaacgataaagtaaaaggtaacatattgttataccgtccgtcaaataagaaatttgattttaatacccaaattgctttaacaaactcagcattgttaattccgaaaaacaaactcgtgaaaggacgttgggacgtcaatatggaatggcagtacggaggaaaaaaatacctgtctaaagaggtaatctatgtaaattaatattttaagaccgatcaactgaaaagattgcttttcagttgattttgtctttattcgcacagcatttttgcttagcaatagtaaagcaagctgtatcaaaaaactaaaaagatgttgtattccgcttttatatttggattaatcagcagtttacactgtatcggaatgtgcggtccaattgctatgatgttgcctgtcgatcgacaaaatgaagctaaaaaggtgactcagattattacctatcatttaggtcgattgacagcatacgcaaccattggacttatttttggtttattaggaagagggttctttttggccgggcttcagcaaaatatgtccatttttattggcttggcgatgatagccattgttctaattcctgaaaaggtcttttctaaatacaacttttccaaaccggtctataaaattatctcccgggtaaaatcaagcttagggaatcaatttaaagacagaagctacaaatctctctttacaatcggactgttgaatggctttttgccttgcggaatggtttatgtagccttatttggagctatagccatgcaaagcgccggtttaggagtgctgtacatgcttttgtttggtgtgggaacaataccgttaatgacagttgtggtgtatgttaattcattaattaaacttccattccgaaataagattcagaaagcaattccctatgttgctgttattatcggagtattatttatcctgaggggattaggtctcggaattccttacatttctccatccaatatgagtttgtttgttcagtcaactcctaattgtcattaaaaggggatcgagatcatgcgaaaaatggtgtagcattgaagtaaatcagggatcagttgcaaaagttaagaattaagcaaaaagattacataatctgaatagaagagatctggttggatttgcgatgaaagagctctggtaatagtcttgtttgtagcgttatcaatgatgatggtaattataggttatgctctgaaaggacaaaggcttgatcgctaagaaaagcatccggtatattttgtgtgagattcttcaagaatataaactttttttattgggatctgtaagggacgaaaattgctttcgccctttcagggcaatactcatgcttaatttagttcatagtgctttgcactatggttgtactttttgggctttcagccctttgtcagcgtttcgaacatttatgtaaggaaaagaaggctctgaataagatatgatcttctaaaatgatatttcatttgaaattaatgaccaaacctttataatcacaataaattttatccgttcgcagattttcagctgatccgaaaagttaggaagaaaagggctgaaagcccaaaaaaagcaacagcatagtgcgaagtactatgagttagattatagaggtagaattgccctgaaagggcaagagcctccagggatcatgttgattcggataaaagcaatacaatttcttagaggatttcatgaaaacggtataaaagttttttgttacgctttaatttttatcctttcgatgacataaacaattatccggagcattacgaatgatctgcttgttgcttttgttaatgctcttccagagcaatttaaaccgtcatagaaaacaggtttgtttccggagattttctttttaaatgcagatcgaaggccatacaaatgttacgtacaaaaggttttcctgcttcggtaatcttaattttattttcttcaattacaactaactgatcgttttccatttcttttaaatcggataaaaccgctggaatttctttgaaatataaagattcatcactccaggaagtttcaaattcacaggttaagtttaaaatatgttttcggatgattagatcttcatcatcaagaatgtggcctttcaccactggtagttggtctgattccaacaattggtagtattcttccagagttttggtattttgagcaaaactataccagctatcgctaatagaggaaacccctaagcctatcataagctgtgtttttgaggcgctgtaacccataaaatttcggtgtagttttttattttgcgccgctttgtatagactgtcggaggcgaaggcaaaatgatccattccaatttcatgataaccgttttgtgtcagtaattgtttaccaacttcatatagttttcttttctcggcatctttcggaatgttttcgtcattaaatccacgttggccattgcctttgatccagggcacatgggcataactgtaaaatgccagacgatccggttttaaggagttcgttttttcaacagtatcaataacattttctaccgtttgaaaaggcaggccaaatataatatcatgaccgattgaagtatatcctatttctttggcccaaaaggtaacttttgccacattatgaaaaggctgaatcctatgaattgctttttgaaccttttccgcataatcctgaacaccaaaacttactcttcgaaaacctaaatgatacaactttttaagctgttcgtaagtggtattgttcggatggccttcaaaactaaactcgtagttttcagctttccgggcatttttaaaaataccattgataagctgttccagattgtttacagagaagaaagttggagttccgccacctaaatggatctcttttataattggcttttccggaagtaaattacaatataaactccattctttcaaaagagcttttatataagtttcttcaacattatgatttttagtaattcgtttgttacatccacaaaaggtacataaactttcacagaaaggcaggtgaatgtacaaactgattccgttttgagaattgctctctgcaaaagccctctggaatgatgcaatccaattttgctcgttaaaattattttcattccaataaggaaccgtaggataactggtatatcttgggccgggaacgttgtatttttgtgttaatgaaattttcataaaagaggattttggatcctcaaaattagagcactgctgccgaaaataaaatgacaaatatcatataaaaaaaagagactcattttgagctacgatgtggacataagtatagaaagtaacaggaattgcacgaattgtctccaatttgtttgtgaaattaatttcacaaaaaaggttaacctattcaaatttgtgcaaattagtggaatttgtgttcacacggtagcccattttgagcctcttttactgaattaaataactaacatttaaatagaatcctgaatgattttaagccatttttttgcaaatacatgatcctgataagcgcttatttgtttaatacggtcatcgttgaaatcatagaaagcaattatattttttttagaagtttctttgtccagaaattcaaaatcgatttttagtatgatatccgagttcccgtcagtcgttagtgccaatttgcaggaagagacatttttcaaatcaacataagtagattcttcctgattgggattgaaattcatcagaatgaattttttattcttttgatcaattgtcagtgttttattgctttgagattcggtcagatcaaagtcttccggatgtgttggattgaatctcttttttatgtttaggattttagatttgttggcagcgtttgaacgtgctgaaaaataaataggaatggctactatgatggcgatcacaataccaattatggttacacttgtttccatttgttttaaaatttgataaattgatatgaaatagtaaacagttttcagattgaaaacggcttaataatggggaaaagaaagatcttttcgactaaaaattcataaagtaatctaccagaaaaaatggaaggggtagagcattaaaagaacctttttgctctgagtgttaaactgattggcaaagtttgaggcagtatttacggtctgatgctgaggaacagcgaccaataaagagtcaaaccatttgattaaaccggaaggattggttttgatattccctatcaaatgataacctgtttgtggctgaataaaagccaaagagtcggtatagtcgattgaaaaagtagtgtctgtttttttactttcacttttgtcaacaacagactcgtttgcctgagtggcaaaaaaagtgatgatcaaaagtgatataaaagcaacagtcttacgaatccaattcatggtcgcgaatttaacgcttaaaagacaattaaggaaattttacagcattaattaacgtttgaaaaggggctaattattttatcctcaacttttaattggtacagttgaggataaaacaaagttattgttgcattttgaaataatagtcagctgagtgttttccgcttccatagaataaaaagaacacacaaaccaataaaaccacaatggcaagaatcaagctttcagaatgcatgtgtcccataaaattaatcagcacggccccaaaaaggatgggtaattgagcagctattgcccaacgggtaaggagcccaaaaacaatcatgatacctccaatcatgtgggctggtgcgatgtaatgtaacagaaacattccgccaccaaatttatcaataggagaaattaaatcatgcagatactgaacattcgttacaaatgaaactcctttcataaataaaaaaacacccaatacaatacgtactaaatctacaggtaaataagtgtgcgaattggcccatttatttaagctttttacattttccatgatattacgtgattaaaaattacttactaaagttactgatttttaatgatatatttatttttaagtaactgaaaataagttttttactttttatttaacgcatttacgggaatgtctttaaacttaaacctgaatcactcccaaattaaaaggtttttgaataggagcatggttggcagcttcaattcccatagaaatccaggtacgggtgtcaagaggatcaataatagcatctgtccacaatcttgaagcagcgtagtagggagaggtttgtgcatcataacgcgcttttattttgttaaacagttccgtttctttttcttcgtctacgatttctccttttgcttttagagaagaagcttcgatttgagcaagtactttcgcagcctgagttccacccataacagcaagttcagcacttggccaggcaaaaattaatcttggatcataagcttttccacacattgcgtagtttccggcaccgtaagagtttccaacgataaccgtaaattttggcacaaccgagttgcttaccgcatttaccattttagcaccgtcttttataattccgccatgttctgactttgatccgaccataaaaccggtaacgtcctgtaaaaagactaaaggtattttcttctgattgcaattggcaataaaacgggtcgctttatcagcactatcggagtaaataactcctccaaattgcatttctccttttttagttttcaccacttttctttgattggctacaattccaactgcccagccgtcaattctggcatatcctgtgattagagattgaccgtaaccttctttgtaagcttcaaattctgaattatcaaccagtcgattgatgatttccatcatatcatattgctcatttctcgcctttggcaggattccataaatatcttttggctccagagctggtttttcagctttgatacggctatagccagccttatcaaaatcaccgattttgtctacgatgttttttattttttctaaagcatctttgtcatctttggctttgtaatcggtaacacctgagatttcacaatgtgttgtagctcctcctaaagtttcattgtcgatggtttctccaatggctgctttaaccaaatagcttcctgcaaggaaaatacttccggttttgtctacgattaaagcctcgtcgctcataataggtaggtaagcacctccggcaacgcagctgcccattacggcggcaatttgggtgattcccatactgctcatttgtgcattgtttctaaagattcttccgaagtgttctttatcagggaaaatttcatcttgtaagggaagataaacaccagcactgtctactaaatagatgatgggtaatcgattttccatggcaatttcttgtgcacgcaggtttttctttccggtaatcggaaaccaggcaccggcttttacggtagcatcattggctaccactatgcattgttttcctctgatgtatcctactttaatgacaacacctccagacggacagccgccgtgttcggcatacattccttcgccaacaaaagctccgatttcaatacttttagaattttcgtctaacaagtagtcaatacgttcgcgtgcggtcattttgccttcagcatgtagtttttcaatacgtttttcgcctcctcctaattttactttagtaaatttttgttttagttcagaaattagtaatttattgtgatcttcgtttttattgaagtttaaatccataatattttaatgttttaacaaaatagtgttggctaatttacaaaatcaattgaaacccacataataaatattgtgctgttatgaaattaaatgaaggttctgctagttaaattttcagtatcttttagaagaagtaaggtgcctgtttcggacataaaaaaaccggaagcgaacttccggtctttttgatattgattttaactcgttggttgtaattgtgaaaaatgattttaaacacatagaaacatagttttttgggtataaagaaagagtacaaaaaagaaatatatttctttcacatagaaaaactttttgctttttaactaagtgaaacatcttttttggactactaaaaagatgtttctatgtgttaaatttaattattccaaaggttataattaccagattattttttagtatcgcaaaccattcgtttcagaagagcccattgttttaaggcatctctggcttctacagcaggataacctaacatggtttttccagcagcaacatcacagatcactcctgagcctgctccaactacagcaccatcaccaattgttgtatggtctttgatggaagcgcttccgccaatgataacaccatttcctaaagttacagaaccggctaagccgctgtttcctgccatgatgcaaaacttacctagtttactgttgtgtcctatttgtactaaattgtcaattttgcagccatcaccaagaatagtagagctgaattttccgcggtctacacaagtattcgcaccaatctcaacgccgtttccaataattacgtttccaatttgcggaattttcactaatcctttctcgctgcatggacgaaatccaaaaccatcagcgccaattgttgcattaggatgaatgatacaatcgtttccaatatgacaacgttcccttacaactgttccggaccaaataacagtattattaccaacggttgattcgtcaagaatagttacgtttggataaatagtgctgttggagccaatctctacttttggtccaatgtagcaaccggcaccaattttggcaccttctccaataatggcggtttcatctacagtagcagttttgtgaatattagtatggaatattggggcaggaggggcaaaaagggctagaatttgtgacatggccagatcggcattttttactttgataaaggcacgattttcccctggctctattgaaatatcttcgttaactactgcaatagatgcatttgaagttgaccagtatttttcatattttttgtttcctataaatgaaatttctgaagttgtcgctttttctagttgctctgtggctgtaatgctttgtgaagtagtgccgtaaattacgccattgattactgcgttaatttcttgaatggaataggatttcatttaatgaatgtaatagattatagggttaatttttcccaaataaaatcaattagattttaattacctaatattatatccctctagatttgaatacaatacgtatagaatagacaacatctttagatgttggaacatatattaacaatcaaaatggctttagccgaataacccaatgaatcctattttaaatttaaaatgataaaattgcctccaaatttatctggcggacacataagattacatcataaaaggctttagccaaataaacaatcctcttaagaaatgaaaaaagaactgcatattttctttacctgtttaatgttttacaccagaatcccgtgtcctaaaaacatcaatcatgatcctgactatttaaataaggcaacacgctacttccctttcattggctggattgttgggagtatttcctttctggctttttatcttttctcgctttttctatctattgaaaccgcagtacttttggctattatcgcctcaattttaaccacgggagcttttcatgaagacggttttgccgatgtctgtgatggttttggaggtggctggaccaaagaaaaaattctgcttatcatgaaagacagtgcgattggagcctacggagcgatcggtttggttttactatttctattaaaattcaaactgctttcagaatccatttcactttttaccactaacatttttctaattttccttttgtttatttcggcccattccttaagtcgtctcgcagcaatatctattatttttactcacgaatactcccgcgatgatgcgacgagtaaaagcaaacctatcgctaagaaacacagttggaaagaaattacaggttcgttcttcttcggactaattccattattggcattttcattttttcaatctgaatttcttttggcaattattccggtattcatcatgcgttattttttagcccgctatttccaaaaatggattgatggttatacgggcgactgtctgggagcaacgcaacaggtttgtgaagttatttactatttgagcattcttttgatatggaaatttatctagttcgtcataccgaaacaacctgcgcaaaaggaatctgctacggtcagactgatgtagatttggctattccattcgaggaaacctttaaggatattgtctcgcaattaccttctgaggccctactcttttcaagcccattgaagcgttgtaccctactggcccaatacatccaaaatactgtaaaacccgtttcctttgttatggatgatcgtctgatggaaatgaattttggcgattgggaattgaaaaactgggatgcaattcctgcggaagaacttaatccctggatggaagattttgtcaccacgcaagtcccaaacggcgaatcttttacaacacttcacgaaagagtgggtgcgtttttacaggattacgttttcaatcaaactgctcctgtagtcattgtctcacatgcaggtgtgatcagaagtattttatgtcatcagtccggattgcctttaaaagacgcttttaccaataaagtcgcattcggacaggttattaaaatagtgaattaaatgatcatttgttcagaatccctctctaaaacgaaaacaaatttgaaaattcaataattttaactttatctttgcagaaaattaaggttgtgttcattcatacacattaaaagggaatcaagtaataaatcttgagctgtacccgcaactgtaagctttgttctgaaaagaatgcttgttgttaactacaaaaccactgttcgctctgacgaatgggaaggtaaacaacaagacgcaagccaggagacctgcctttgtaatcaatatcgagctctcgggaaaaagagtgtagaaattatgactttaaaaaaactttttgctctttgtttcttattgttgtgccagattaccgtggcgcagagcgattctattacgaaacttaaaacagtagtcgtttctgacgctaatcttaaaaaatactccaattcacaatcggttttaaaactaaatgactctgttattggcaaaaatgaagccttattaacggatttgttaaactttaattcgaccatttattttaaagagtacggccgcggaatgctttctacagttgcttttagaggtacaacatcatcgcaaacggctgtaatctggaacggaatcaacattaattcccaaatgaacggaagtactgattttaataccatttccggatccgattataattctattagtgtaaaagcaggaggaggaagtgttatttacggcagcggagccgttggaggaaccgtgcacttgaatacggatctcgctttttacaataaatttgaaaacagtttaagattggattacggaagtttcaatactatcgggattaattataaaacaagtatctccaataaaaaatggagtactcaaattggtttttccaaaaacagttctacaaacgattataaatatctgaaccaatacaactggaaaggcgaacagcgttggaatcaaaacggtcagtatgatgttattaccctaagtgctaatgcaggatataaaatcgatgccaaaaacagtttaaagctatatacccaaacttcaaacaccgacagaaatacttcattggtttcggaatctgaaactaaaagcaaatatgttaatggctttaatcggaacttattagagtatgatggtgattttggcagattcaaaaccaatttcaaaacagcctatatttttgagaattataaatattatgccgacaattccagcaatatttatacctacggaaaaacagaaagcctgactacaaaagccgatttaggatatcagttattagaatcgctgcaagtaaatggtattctggactacaaccgaactaaaggatacggaagtggttttggtgataatgttagagaaataagttctgcggctttacttataaaacaagaggtttctccaaactggaaaaacgaatttggggttcgtaaagaatttacagacaattataaatctccggtactattctcggcaggctcttcttatcagtttggaaaactgtacaatttaaaattgaatgtatcccgtaatttccgaattccaactttcaatgatttgtactgggaacaaggcggaaatcctaatttaaaaccggagagttcttatcaggccgaaattggaaacgttttcaccattcagaacttctctttgactcagactttttattatatcaaaataaaagatttattgcagtgggtcccgggagctaatggtatctggtcaccgcaaaacacagacaaagttaatagttacggcgccgaaacactattgagttggaaaaagagttttggcaaaaacaacctgactgcaaatgcgacgtatgcctattcaatttcagaaaatgtagaaaccaaaaagcaattgttttttgttccttttcataaagtaaccgctgccatcgcttactcaagaaataacctatcagcccattatcaatttctttataatggctttgtgtacacacaagctgacaatgaccccgaaaaaatcgtatcggcttacaccgtttctaatattggtgtagactacgattttaaatttttatcttctttcaaagtaggttttcaggttttgaatgtttggaataccttctatcaaagtctggaataccgaccaatgcccggaagaaattataacctgtacttaaactttaaattttaaaataatgaaactaactagattattcttactagcattaagcgcatcgctttttgtttcttgctctaatgacgactctgatggacctaaaggagtttatgataatggcgttttcatcttaaatgaaggaaactttactgacggtggttccgtttctttcacatctgacgatttaaatactttcacgaaagatgtttacaaaactgtaaatacgagcgatttcgttggaaaatatcttcaaaacatcttttttgacggagacaaggcttatattattgccggtggttcaaatgttattaatgtagtagaccgctatagctttaagctgattgcaaaaattgacaccggacttgctaatcctcgctatggtgttgttaaggatggtaaagcttatgtaactaatgctaatacctatcctagctacactgacccggaaaaaaaccctaacgccaatattgacgattatgttgccgtaattaatctgagtacaaatactgttgaatctaaaatcgaattgaaaggtacaggaaacagaattgtgttagataatggaaaactatacatcactgagccaaataacagcgacaagttgttggtggtaaacattacaaccaaaacagtagaaactgttactattggttcagatgcagattctattgaagaagaaaacggagttctttttatccttagaaaaccttacggtgctgccggagaaattgtaaaagtaaaaatttcagacaaatctgtttccaaaattgctttgcctgctaatttaggaaatgctggtcaattagatattgaaggtggtaagatttattatactgcttcaagttctgtttatgttatgaatactactgctacaacagcttctactacaccaatcttaacttctcctgtaggttatttatacggatttgcagtaaacgataatcgtatatatcttgctgacggaggtgattttaaatcaaacagcaaagcttacatctacaatttaagcggaacattacaaaaagaattaacagttggtgtaggaccaaacggtttttatttcaatgattaattccagtaattcgtttggattatgacataaaaaaggctttcatttctgaaagccttttttattatttcaatgctcgtaaaagtccttccggagctttatcaatatacatttgatttttaattccgtccattgctttagcatctgtaaacgctttcaatactaccccactgtcgtctcctgcttttttcgcactgattcctgttatttgagatattgctacactcagtaacggttcatttggatctcccagaactcctaagtttgtaatgcgctctaatttttcatacgttggtttcaaaccgtctgtgtattctccaaaatcagatgcatttacaatttttaaaaccaaaggctgcatcgcatacttatgatttggattacggttcgtttttccaaaagttggagaatcgtataaggttactgatcctacatttttaccaacagtagtctctcctacctgaactacagaaatataaggcaccaaaccgtttataaccaattcacttgctgatgctgtaccacttgtggttaaaatataaactttagtcaggttcaggctgttaatcgcaacaccgtccattttatctacaaatttattcagcaccgactcaggatcttcactttgataatattcgttgattttggcattccatttctctttcgaaaaaactttcccggtaaactgtccggtaatcatactggccaaacgtgttgaagtttgtatcgagcctcctccgttatatctcaaatctaaaaccaaatccgtaaccccctgcgcttttaattctccaaaagccgcattaagctgcgcatcataattggcataaaaaccattgtacatcaaataaccgattttgcgacctccggatgtaatcactttattgataaaaacaggattttcatctaaagttgtttttactaatacaactgtttttccattaccatcaaaaccggtaccgttaaaagtagccatattcagggtataactatccgctgccaatagcgactgataatttgaaaccgtcaaagaagttccgttaatccctgtaaaaagatcccctctcttgatctcttttttagaagcatcagaattaggtataatataacgtacgtaacccactaaatcagtagtacttcccggtttgtaactaagcctgaaatccataccgttattttttgaagtcccctgaagttcctgttccaaaaccgtataatcgtcaacaatccagctaaaacgatcaattgcctgaccttttggaaatttacttatgggtttattcaataaatcctgaaataaatcctgcggtttagaatatcctctcaaaaatgcatttaatgcttcctgattgctaaaacggtcatccgccaaagtaggaacatcagcttgccataaataaaactgattcagtcctttccatacaaaatcattaacctgcaatgaggccggagccgcaacatcatcctgatcttcacaagattgcaaagaaaaagcaagtaaaaataataacagtacacttcttaatattgtcttcatatagtaaatatctatctagtagtaacgtaaaaatactatctttagttttaactctaagagttttattgctttttttattgcaaaaaaaattaatcccccgtgtaacaaaaataatagtgtctcgtcttcactatataagctaacgaataaccaaccaattttatgaatcagaatgtgtttatagaattaataaatccttttaaagacaaagtttttcgtctggcaaaaagattgttaaccagcaccgaagaggctgaagatgccactcaggaagttatggtaaagttatggaacaaaaaagacactctggattcttacaatagtgttgaagctgttgcaatgacaatgaccaagaattattgtctggatcagttgaaatcgaaaagggccgggaatctcaaaatcgttcacaacaattatacggaccgggaacctcaactggacaagaaactggaggattcgaatagtttagaatgggttgaaaaaattataagccaattacccgaacaattacaaatattaattcaattgcgggatgtagaacaatatgaatttgacgagattgcaaaaattgtcaatatgaatgaaacggctatacgcgtagccctttcaagagcgagaaaaaaaataagagaatcaatggttaatacacacagttatggaattcaataaaatagaaaatatactagaaaaatactttcagggagaaaccacgattgccgaagaaaatcaattaaaagaatatttttcttcaccggatgttgcgcagcatttggagcaatacaaaccaatgtttggttatttctctcaggtaaaagaacagaaatcgacgcagacgatcccactaaaaactaaaaaacgaaatgtggcgtggttatcgattgcagcttcagctgttgttttgctgggaattggaacctatttctatacgagcgaaaaaaatgcaactccggttacagctcaaacagaattgggaacctatgatgatccggaagaagcacttgccgcaacgcaaaaagctttggccttattatcaaacaatgttaatgtaggtattgaaagtgtacaatacattaaagaatacgaacaatcaaaaaacaaaatttttaaacagtaatttaaatctcaatcaaaatgaaatcaacgattcacgaatacagaaaaaacaataaaaaaagcatgagtaaaaattttatcataacactagttttagtattcattagccatgctttttacgctcagggagcatttgacaaatttgatggtcaggacgacgtaacctcagtaatcgtaaacaaaaaaatgtttgatttaatgagtaaggtaaaagctgacacttcagataaagaaacgcagcaatacattaatctgattaaaaaattagactacctaaaagtgtttaccactaaaaaccctaaaattgaagctgacatgaaagcttctgcagataaatatataaaaactgccggtttagaagaattaatgagagtgaacgacagcggtaaaaatgttagaattctaatcaaatcaggatcaagcgatacgcaggtaaaagaattactaatgtacatcgacggagctaagggcagtgaaacggtattactgtctcttattggtaactttgacttaaacgaaatctcagtactaacagataagatgcagcttcctggaggttctgacctaaaaaaagcttctaaaggcaaaaaataagatgaaagcaagcgttattacctcagccctattagttttactaactttggtaagttgtaattctaccccttcattgcagaagtattttgttgaaaacacagacaataaagattttattgcacttgacatttcatcatcgattctaaatgtggagaaagcgaaattatctgcagagcaaaatgaagctttaaaatcgttcgataaaatgaatattctggctttcaaagaaacctcaaaaaatcaggcgcaatttgaaacagaacgcagcaaactgaaagagatcctgaaaaatccaaaatatcaggaactaatgaaggtcggttcaggtaaagacggcgcatcgataagttatgtaggagccgacgacaacatcgaagaatttgtggtttttgccaacaaaaaagaaagcggttttgtagtggtacgtgtgttaggaaaaaacatgaaccctaacaacattatgaccttgatgtcggttatgaaacaatccaatattaacatggatcaactaaagcctttgcagcaattaatgaaaccataacctctaactttatagtaaaacaagagagctccgtaatccggagctttttttatttaacatttttagaagattatactgaataatatcgcatgtgtttgttttaagatgacccgaatttatctatatttgttcatcaaccaaaacaaaattattaaactaagtatggtacaaaaaacatcgaacgcctttatagcggcatcatgggtagctcttggagcaggaacagttggatttatagtaggacttgccagagccgaaatgctcttaaacgaaaaaggatattatttcaccgttttaatgtttggtctttttgctgttgtctccttacaaaaaagtgttagagaccgactggaaaaacttccggtaactgatatgtattacggaatctgctggttcggaactcttttatctattgtattattaattgtgggcctatggaacgctacgatcttaccaagtgaaaaaggtttttatgcttttgcttttttactggctctttttggagctatttcggtacaaaaaaacacgagagacaatatggcgtactcttcaaatgaataatatttcaactagaattaatcaaaaacaacttccaaaattaaccacaaaaaaagctccataactggagctttttttatgaccgtattttgtggtttgcacgaacatcatttcccgttgtgctactaaagcaatcacaacagaccaaataaatccatttatcaaacgaaaaatacatcattactaccatttattacaaattacaaaaaattaaccatacataacttactttagcggtttaaaatatttttgtatgaaaaaaaatctcctcttagcattagtatcagcctttagccttaatgcacaaaccgtctcaaattacacgacagattttcttcaaactgcatacgccgtcccatttggccttgtgtttgattcaactggaaacttatatattgctaataatgattataataaaaatttaggaattaccaaaatgactccaaatctggttcaaagtacttttatttcattaaaaaaatttcctaggcaaatagctcttgatgccaaccaaaatttttgggtaatcagtcgtactgaaaatgggtataaacttttttcaggtgaaaacgaaattacaaaaataacccccggcgatgtaataagttatcctacttctgcagacatatggggaattgctatcgatgcaaggggaaacgttttttattcagaaaggactgggaaaattcaaaaaataagtaccacaggagaaattagcacctttttttcagatcctgctactcttaaatccccatcaggattagcttttgataaggcaggaaatttattcgttattgatgaaagtgatggtaataatcccctcagaaaaataaatcctgccggtgtcattacaaaaattcctgtaacttttgaaaagacatcacaaacaatagaaaatggatacctctcttttgcttcaaatggcgacttatacatttctggaaaaacaagtgaaaataatttttctgcaaaaatttttcgtttacctgctgctgatgtaagtggtaagctaatacttttttacgattttccttacggcgccattaatggaataactatttacaatggaaatctttatgcaagtttatatgtaaaaaacgaaagtaaagtagtaaaaatagcacctaaaattctgggagttgaaaacgcaaccaaatctattactaaagaaattatagtctacccaaatcctgcaatcgactatttgtctattgacagtaaaaacgaagttgttgaatcaatccaattattcgaccttaccggacacctacttaaaagctacaaacctgctgaagtcaaagaggataaaatcgctttaccggctttaacttccggaaattatattttaaaaattaacaatacttctaaaaagattctaatcaattaaacaacctccattaaactaaaaaaagctccagttatggagcttttttttatcagaatttgagattatttactcaagtacatttttcttctagaatacaattcgtagaactgatcgtcttttaagtcatcaataaacaagatactctctcctgtcgatttcatttcaggccctaatgctttgtttacattgtggaatttactgaaggagaataccggctgtttgatcgcatatcctttcaactgtggattaaaatcaaaatcagttactttattgtgccctaacattactttggtagcgtagttcacataaggttctccataagctttagcaataaacggtactgttctggaagctctcgggtttgcttcgataatgtaaacggtatcgtcttttatcgcaaactgaatgttgatcagacccactgtttttaaagctctggcaattttctttgtgtgatctttgatttgctgcattacgaattctcctaagttaaaaggaggtaaagtagcattactgtctccggagtgcactccacaaggttcgatatgctccataattccaataatataaacgtttccgtctgcatcacaaatcgcatccgcttctgcttcaattgctccggccaaatagtggtctaaaagcagtttatttccgggaatcgttttcaataaattgatcacatgctcctctaactctttcttgttgatcacgattttcattccctgacctcctaatacataagaaggacgaattaatagtgggaaatccagctgatctgccagtgcagaagcctcatcagccgtttctgcaattccgaattgcgggaaaggaatgtgtaattctctcaacaaatccgagaatcttcctctgtcttcggctaaatcaagtgcatcaaaactagttccgatgattttcacaccgtatttagataatttttctgccagtttcaaagcagtttgcccacctaactgcacgataacaccttccggtttctcatgctgaatgatatcgtatatatgttcccagaaaaccggttcgaagtatagtttatccgctgtatcaaaatcagtcgaaaccgtttcaggattacagttgatcatgatggtttcgtaaccacactctttggccgctaaaactccgtgtacacaagaataatcaaactcaattccttgtccaattctgtttggtcctgaacctaaaacgatgattttctttttctctgttacaacactttcgttatctacataacgctcaccgtttgctttttcaatttctgcctcaaaagtcgagtagtaataaggtgtttttgctttaaactcagccgcgcaggtatctaccaatttaaacacacggttgatatttttgtccatacgcaaagtgtgtacttcactttccagacaattcatcatgtgtgcaatttgtctgtcggcgaaacctttttgtttggcttcaagcaaaagctctttcggaagagtccctattttataatttgaaatttctttctctaaagtataaagttcctcgtattgttttaggaaccacatatcgatttttgtgatttcatgaatacgactcaacggaattcccattgcgatggcatcataaattacgaaaacacgatcccaacttgcaaaagtcagtttttcgataatctgctcgtagtttttatatccttttccgtcagcacctaaaccgtttctcttaatttctaaagactgggtggctttgtgtaatgcttcctggaacgaacgtccgatccccattacctctccaacagatttcatctgaagtcctaaagttctgtcggcaccttcaaatttatcaaagttccaacgtggtatttttacgattacataatctagagttggctcaaaaagagccgaagttgattttgtaatttgattttgtaattcgtctaagttgtatcctaaagccagtttagaagcaattttagcaatcgggtatcctgttgcttttgatgctaaagctgatgaacgcgacacacgagggttgatctcgatcgctacgatatcttctttttcatctggtgaaactgcaaactgtacgttacagcctcctgcaaaatttccgatactacgcatcatcaggattgcatagtcacgtaatttttggaatgttgtatccgataatgtcatcgccggtgcaactgtaatcgaatctcctgtatgaatccccattgggtccatattttcgattgaacagatgatcacaacgttatcatttttatctcttaaaagctctaactcgtattctttccatcccattaaagctttatcaattaaaacctcatgtattggagaagcttcaagacctctggttaaaagctcatcaaaatcttcttttttataaactaccgcagctccggttcctccaagagtaaaagaaggacgaattactaacggaaaaccaaactcctgtgcaatttctttaccttctaaataagaagtcgccgtttttgcaggtgcagttggtacatttattctttctaaaagctgtttgaactgctctctgtcttctgtaatattaatggcattgacatcaactccaattaatctcactccgaaatcctgccaaattcctttttcttcagcttccaaacacaaatttaatgcggtctgtcctcccattgtaggtaaaacggcatcaatttgtggatgttctttcagaatttcaataatcgattttgtcgttaatggtttcaagtaaatatgatcggccatacttggatcggtcataattgttgctggattcgaatttatcaagataacttcaatcccttcttcacgaatagaacgtgcagattgagaacctgcatagtcaaattcgcaagcttgaccaataacaataggtcctgaccctattattaaaactgattttattgatgtgtctttaggcattttatttgtattgtgtagttattataaaagtacttcaaaaaacattcgtagtgtattctaaactagaacgttgcagatttttttaccgacaaggtataaaaaaaggcgatactaaaaaagtaacgccttatttatgtttatagaaacattatttcttgtgtctaggttcgctagaaacagttaatttatgtcttcctttagctcttctacgcgccagaacttttcttccattcgctgaagccattctgtccataaatccgtgcttatttcttctttttcttttcgatggttgaaatgttcttttgctcattgttttgtatctttaaaatggtatctaatatctcttttctgtttttgaatatcattattccaaaaccgagtgcaaatatacaaagacttttttttctggcaagtagttttataaaaatatttttaattccttttgctatctttgcaatcacaaatttacaatcattatgtttcacaaaaatattaaacttattttagccggacttcttgtagtcgctggtatttggcaatttacagagagcaatatcgggaatggtattttccttatattattaactgcaattcctatttttctttacttcaaaaacgaatttatccttttagccttccttaaattaagaaaacaagactttgaaggggctaaaaaatggcttgcctatatcaaaaaccctgaagctgccttagtaagaaaacaacaaggatacttcaattacctgcacggtatcatgttatctcaaaccaatatcaatctggctgagaaacatttcaaaaaagcaatcgaacttggattatcaatggatatggatcttgcggttgcaaaattaaaccttgccggagtagcaatgtcacgcagaagaaagcttgaagcaactaatttattaaacgaagctaaaaaattagacaaacagggaatgctaaaagagcaaatctccatgatgaaagagcaaatgaagaaaatctaatttttcaattccaatattttaaatcccaaattccacaagagtttgggattttttatttagatcttctttctaatataaagattaatgttgaatttgtcatttcgaccaatattgccatcccgaggaatgagggatcacacaattaactcgacaaagattcacgattcagcttacaaaatttctggtgccatccctcattcctcgggataacaagattacggctaaaaactttaaaacctgaaacttgaaacttgaaacctgaaacctgaaacttaaaacttaaaacctgaaacctgaaacctgaaacctgaaacctaaagcctgaaacctgaaacttgaaacttggaattttaattttccaaaatgatcgaaggcagattctcgttgagccatttgtatttattaagaatcataatatgtgttcctcctttgactacaatgcagctattaatatactttataggaaaaacatcatcctgatctccgtgaatatgaatcactttaggatcgatttcacttctgttccataaaataatcgattcgaccgcccattgcaaataattgagatctcgtaccgcgagaaacttttcatacaacttaatacgtttgtttactttttctccaaaagaatatttcgccagattttcgatattcaaaattaatttcatcggaatgagcttataggcttttgttgtttttccgattttcattcgtcttggaaattctttattacttcttacactcgaaataacaattacttttcgggcattaatatgttttgctatttcctgaaccagaacacctccgaaagaaacccctaccaggaccggattctcatgtttaatgtttttagaaattcgaagagcataatctgacaaagattctttcggctgcggaatctcccattccagcaaacacatttcaaaaacagactcgtctaaactgattctctcaaaaatagcgggactagccgcaagaccgggcataaagtatacaggaattttactcatttgactgcaagagaatttaaggttaccgctttttttaagctaaaattactttttttagcgatatccaatgcaaatcttaccccataaattactccacaaaccaaacaaaagcagtaaacatgcacaattcagagctatttcaggggaataaaaaataattttatattgaaaatcaattgattaactttgcaatcccgttaacttatattgaaacattttttccagaatgttctttataaaattaccaaatgttcttttctattattttttttaattcaatcccccaaaacatgacaaatatggaacacattgaaactatggaaatcaaagacaatacttttgcaagacaatttgaaaccatagtccctgaaggcttactttctgtggagtattcttttcaggaaaagaaaattttcttaaccaaaatcaactcccctgaaggctttgataatcaagccacaattgacactttattaaaaggcatcatggaagtggttagcgaaaagaaattccgaataatgcctatccatccaaaaattgtattgtttattaaaaagaatccggaatacaaagagttacttcctccgggaatccgtatttagaaatccccaattaaccggagccataaccctcctattaccatataaataaagagcataaccaaaccggttatcaaacctttgacccaccagcttttcaggtcgacataaccgcttccgaagaaaactggtgccggcccatgtccgtaatgggttaaagttccgtatagagaccccacaaaccccaacataaaagccaacagcaagcccggaattccaagtgaaattccaacacccaataacgcagcatacatggcagccacgtgagctgttgcacttgcaaaaaggtaatgactaaaaaagtataccaatacaataataggaaatgccatttgccagcttaaacctcctatttcagcttttaccacatcgctaaaccagccaataaatccaagttcattgagagaacttgccatcatcaccaaaaccgagaaccacactatagtgtcccaggctcctttttcggcttttacatcatcccaggttaataccgaagtcagcaataaaataaccaagccgataaaagcagtagttgtcgcgtcaatagaaaacagatcaccagtcatccaaagaaacaacagaataaaaaaggttaacagcatcatccattcgtttcgcgtgatcgctcccatttcctttagtttctgagctgcaatttgcggagcatcacctgtttttttcaattccggcgggtatatcttgtacaacaccaaaggaattacaaaaaaagcgaccagacccggaactatcgctgctgttgcccacgaaatccagctaattttaatcccaagattcaacgcaaacttctgacacattgggttacttgccgttcctgttaaaaacattgatgatgcgatcagatttgcattgtaactgctaagggtaagatacgatcctaattttcgatgtgtttcaggctgatccggcatcgaaccaaaactcattgacattgatttcataatagggtaaataatgccccctcctcttgccgtattactgggcactgccggagccaaaactaaatcggcaagtccaaggccataagccagtccaagtgaactttttccaaatatcctgataaacaaaaaagctattctgttccccaaacctgttttgataaatcctctcgcaataaaaaacgaaattccgataagccaaattaccttatcaccaaagcctttcaaagccaaagtgatcgattttcccgcatctccgggagccagcacctgtgtaaaagcggttaatgcaatcgcaatcatacacatagtacccataggggctgcttttaaaatgattccaagaatagtagccacaaaaatggcaaacaaatgccaggcttctgcaacaacaccatccggtgccggaataaaccaaattgcaattccaacggcaagtgtaatcagggtttgaggtatttgtacttctttcataaaaaggaaattaaattgtgttatagacgaagttgtaactgaagcaggaatagattatcattataaaatgaggtgtcaggaatatttttatcgaaacgatctatttcaaatcccaattctattcgtcccgtatacgcttttccaaactcaagactcaacataggcgtatacgtctgacgtacatttgaattgactttataattattgtcaaacgattcaaaacgacaggacagttccagtgaggttaactttttataatcgaccaagtatctcaaattaggcaaaaagtaaattccccgcatttgataatcgtcaacatgtgacgttctcgcatctgccggtaatgaaaaatacaaattatgattggttccctgcttgtattcaatctgcaaatcaaaagtcagtctgtcggtaagtttaaagtcactggtaatatcaatccccaaagcaaaaactttctgattggatcttttcccgattccaccatttaagcccagattaatcttatgttccttagacagaccaaaaccccatctggttgtatacaattttccgttatcattatctttttcctgattttttccgttaccatttaaaacagaaactgcatagttaaccggaatctttccaatatcaaaagctcccgttgccgaagctccaatctgaaaacttgtccatccgtttttaccaaactcatagtactgattggaaaaatcaaatgactttataatatcaacaggaaccaactcttcaataccaaatgcaggacggaactgaccacctgtcaaggctaaatatttactgaaagtatattttccataagcattttcaagaactttagatttgggatcagacttaaaatcagcaagatttacgagaattacgacttctgtagcttcgcttaatttggtattgagtccaacacgcattcttttaatatcaaaggagctttgtgttacttcacccgtagaatgatgaactcccaaaacatctacattttttccggtgttttccaagtaacgtgcctgtagaagtcctttgaactgaaattgtggatatttaacctcactttctttatcagcggctgtttgcgcattcataaaaaatgacgttataaagagaaaaataatttttagtagtagcgttttattcataaatgccgtaaatcaaaaattagcttaatatttataatctaaccttacctcctattggcaccagaaccacgattggaagctggtggcgctgccatacctctattacctgcaggtcgggtcgcgggacgtgttaccggccgggtcgttggtcttgtagttgggtttgttggccgattcacggattgagatggtcttaccgctggtcgggttgatggatttattggggtcaccggccgcgtcgttggatttgttggccgattctctggccgagatggtctcgcctctggtcgggttgatggatctgttggagccaccggtctcgtcgttgacggatttgtcggacgtgttaccggtcttgttgacggattgacgggacgggtggtagcgggtctcgttggtcttgtattggtaaccggagcaggtctcttataatcccttccgttataagttgcattataacgaccgctggttctataatttcgaactacagccgatgaatttcttctagttgtataattactataataacgctggtttcttatagtgatcgttcttctgtaataaggatttctatagtaatgcccgtgatatccccaataatcatgataataaaccggacgccacggacgccaataaggaggataatatccccaataccacggagatcggtacactacatatacaggagaaaacaagtacaatacaaccggccatacgtttatgttggttgtcacataacccggattaccggctgttgtattataattattggttgtattattatttacaattacgggagcatctcctttatatccgggattaggtgttccggctgcagcacctgaaggctctacaatataatttttgccgtacaaatccgcatctcctatgatctgaacatgtacattattctttttatctttatctacctcaataacagcaacatcctgcttttctgtactgcttaccgccacctgaagtacaatcacatgtgtattccctttcttttgactttcgatttcgatataatcaatctcgccatcattattcaaatccagattattcaccttactatcctgttcatttaaaactttttcaaaatcttctaaagttttggatttctgaaagaggtctaaaacagcatacaaattaagattatcacccggcaaacctaaagcaacaggttcgttatcagtttgagaaaacaatggcaaactaaacaaataagccatcaaaactaccaaaaataaaaaactctttttcatgttaaaaataagttaatttggaaatacatttactaaggtatgaaaaaacagacaaactccaatgcaagccgataactttctgtaatacaagtataaaatactaaaaaagtttcaatcactgtttactttttaattccttcaaccttgataatgtaagacttatattcttaactttgtaataatcgccatttttattccttcccatctcttgtactatcttacaaaacctgtttcatgatttgtcaaataacagaaataaaaattgtaatgaaaaaacacttactcccttttcttttttttctttctttccactctgtacaaagtcagattgcagtttcttcaactctggaagaagccattcagaaggctattgaaaaaagtacttcattaaaaaataaagatttagatattgaaaaattaaatcttcaggagaaaggcgtctggaacaaatacattccaacaattgaagccagtgccttatattcatattttgacaacaaactcacggtcgatctccctacggctaccattccaattgtaaactatcctttgtttgacggaaaaaccgcttttaaaaactatggcaacatttttacaggaagtgtcatggccaaaaccgtactattcagcggcatgcaaatcccaaacggagcaaaagccatcaaagagaaaacgaagggaacggtatttttaaaagaaaccgaaaaagatgccatcacaaaagaagtcatcaacacttttgaccaactggagctgctaaaggaaatagacaaacttattaaagaaagtgaaaaccgactgggtacggaaaccaaacgtgttacaaaagcaattgaacaaggacttgctattccgtatgacagagataagatcaaactagcggcactggaactttcctccaaaaaaattgaactggatggaaaacgaaaactaatttataaaaaaattcaatatttaaccggctattcgattaccgagatagatcatgttcaatataccttaacaccttatctgattacggacgagaaattaagcacacaaaacaagcaggaaataaaagctttagaatctttcaaatcagcttatgaatatttattaaaaaaggaaaaaggaacttacttacccacactcggagcttttggaggtgtatcctattccagtttattcaatgccaatgcaacgactcccattgttacaggaatcaatcaggccttatatttaggtcttaatgaactgaccataagtcagaactgggtcgtgggagcagctatgaaatgggaagtcttttccggttttgaaagaaaacacaaagtacacgaagcgaagattaacattgaacaggtacaaaatcaaattgatgatacgaaagaaaaacttgaactgcttcttgaaaaaaatcttgttgattatacggttctgactcaaaaaatagacatcacccagcaacaggaaaaagtcgccagtaataatttgaatctggctataaaacaatacaaagaaggcctcatcaacatatcggaacgacttgaagcagaaaacgattcttataaagcagcagtaaacaaaaccaccactttaatcgagcaaagacttgctgctattgaaaccataattgccactggcgatctgtcgaaaaaactatccaaataaaagttctgttttatgaaaaaagcaatcattagcaccacaatcatttttcttttcgtagcctgtcaaaagacagaaaaaggaaatttaattcagggaaaaatagagaaagaacaaattgccgttgtgagtaaaattccgggcaagattttaaaaatatgggtcaaagaaggcgatttggttcaaaaaggagacacgctcgctgttttggatattcctgaagtagacgctaaaaaaagtcaggccgaaggagctgttgtctcagcaaaagcccaatacaaaatggctgtaaaaggagccacggaaaaccaaatcaagcaattggaagctaaaagaacggggctgaaagaacaatacgaatttgctcaaaaatcgatcagacgactgaccaacatgctcaaagattctctcatatcacagcaaacttatgatgaaactttcgccaaatatcagggcgcacaagcacaatataacgctgttatcgcagaattagacgacgctaaaaaaggagcccgaatcgaacagcaaacgatggcactcggacaacaggaccgggcacttggagctttacaggaagtagaaactgcagacaaggaacgctacatcattgctccgcaaaatatgagtatcgaaaccatcaccttaaatcttggcgaactggccctacccggttatactttgtttaatggctatatcgataacagcatttattttcgctttacgattcctgaaaatcaattgggagaatttaaaaaaggacaggaaattaccgttcatgttccctataaaaatgaaaacataaaaggaagaatctcaacgataaaacaactgggagcctatggaaatattgctacggcctatcctgattatgaaatgcaggaaagcttgtttgaaataaaaattacacctgttaatatggaacaaaccaaggatctgattacaaaaacaactgtcaccttatctcattaactatgcaaaatttcttttcattgcttaaacgggaatttcaattgttttggaaaaacaaagtcctgagaatcctttttatcggtgcacctattttatatggtgttttattaggctacgtttacggaaagggcaaagttaccgacttacccattcttgtagtcgatcaggaccgttctgagctaagctcaaaagccattcaaatgtttgaagacaacgaagtattatccatttcatccattttatacgaccagaacaatctttctaaacttgccatacaaaaagatgccacttgcgtcgttatcattccgaaagattttgaaaaaatgacgctcaccaaaaaatatcctgaaattacaactatcgttaacacctctaatgtactcactgctaactatgcctcaacagccatacaaatttgtctgggcactttaaaggctggcgttcaaatcgaaaccttaagaaaacaaggagtcccggaaaacttgcttgcctcccaatatgaacccttcaaaactacgtttatcaaaaaacacaaccgaagtaccaattatatgtattttctctggccgggggttttggcgactgttcttcaacaggttttactattaggactggcgctttcatttgcatcagaatttgagaatggaacttttaaagaccttgtgaaaaaatgcccttctcttctgaaaatgctcgcagtgaaaataatcccttacctgatcatgagctttggaatctggatcatttactggctcttcactttgtggttccgactgccattttacgaaaacttagcgcctcttacttttattgccggaatttttgtgctggcggcttcctttatcggaattctggtcagcatcgtagttccgaatcagttaaaagcaaccgagattttaatggtaatagccacaccaagctttatcttaagtggttttacctggccattaagtcaaatgccacagacagtacaagccattgccaatgtaattccgctcacccattttttaaaagctttcagaatattaattatagagaacggtaccttttcacaaaccacagcctctatacgcaacatgatcatcattggactcgtgtgcgccatagctgcctacattgccttatactttaaaaagaaagaagcacttaaagaaatttaactcctttattacgatacataaaaaaagcacagaaaattcaattcctgtgcttttgtatcttaagagtaaacgaaaattatttttcgatttctcgcatagaatccattttcttatgcgccaggaatcctgcaacatcttcaaagtgctcttttacacgtttgtttccaaattcaaacactttagtagccaagccgtcaaggaaatcacggtcgtgagaaaccaaaattaaagttccgtcgaaatcacgtaaggcatctttaataatatctttggttttcatgtccaggtgattcgaaggctcatccagaatcaataagtttacaggctctaacaataatttaatcattgccaaacgagttttttctcctcctgaaagcacttttacttttttggtaatatcatctccctggaacataaacgctcccagaatatttttaatctgagtacggatatctcctaccgcaatagcatcgatcgtttcaaaaatagtagcattttcatctaataaagaagcctgattctgtgcaaaatatccaatttgtgcgttatgtccaatctcaacacttccggaatcaactccaatttccttcatgatcgctttgatcatggtcgattttccttctccatttttccccacaaatgctactttctgaccacgttcgataacgacattagcatctttaaataccacatggtctccataagccttagacatttcttttacaataactgggtattgcccggaacgtgccgctggcgggaattttaaacgtaatgcagaagtatctacttcatcaacctgaacaatttcaagcttctccagcatttttacacgagactgaacggcgtctgtttttgagaatgttcctttaaaacgatcaataaaagccctgttatcagcgatcattttttgctgttcatcgtatgctttttgttggtgtatacgacggtcttttctcaattctaaataatgagaatatttcgctttgtaatcgtaaatccttcccatggtcacctcaatagtacgattcgtaatattatctacgaatgctctatcgtgtgaaatcacaactactgcttttgccgaattaaccaaaaactcttccaaccattgaatactttcaatatccatgtgattggttggctcatccagtaaaatcaaatccggtttttgaagaagaattttagccaattcgatacgcattctccatcctcctgaaaattcagaagtctgacgagtaaaatcttcgcgctcaaagcctaaaccagttaatattttttcaacttcagcttcgtagtttacttcttcgatcgcatagtatttctcacttaaatctgaaactctctcgattagtttcatgtaagcatcactttcatagtcggtacgaaccgttaattgctcgttgatttcatcgatttcagctttcattttaaaaatttctccaaaagccttagaagcttcttccattacagtagaaccatcttttgttaacaaatgctgaggcaaataagccacaacagcatctttcggagtcgaaacacttccggtagaaggtttactttgaccggcaattatttttaaaagtgtcgattttcccgcaccatttttacccataagggcaattttatcattttcattgatagcaaaagaaacatcgctaaataatgtagttccaccaaactgaaccgaaatatcgttaactgtaatcattatcttctgtgaatttgtttaatcggttaatcgtttatttgacaacccatttttttcgtggtgcaaagatagattaattagataattaggcaattagataattagaaaatgtggcaatgtgataattcttcaaaacctattccaaaacaaaacccgacaggattttaaatcctgtcgggtttgctaaaattatctaattgcctaattatctaatttagtctttcctccattttttagtttcttcgaaaatgtgttctaaaattgaagcttctgtttcgtcaaattcaatatttcggcgtcccataactaatttcgctgtttcaaaagcttttttagtcacataagttgtaaaaccagctgccccgccccaagaaaaacttggaacaaaattgcgcggaaaaccgctcccgaagatattagcacttactccaactactgtcccggtattgaacatagtattgataccacatttactgtggtctcccatcattaaaccacaaaactgaagtccggttttagcaaaaccttcggtttcgtagctccataatttcacctcttcgtaattgttcttcaggttcgaattgttactatctgcaccaatgttacaccattcgcctaaaacagaatcccctaaaaatccatcatgacctttgtttgaattcgcaaaaagcaccgagttcttaacttctccaccaattctcgatccgggacctactgttgtagctccgtaaactttggcgtttagtttcacctgtgcattctcacataaagcaaaaggtccgcgaattacggttccttccataatttctgcattcttacctatatatattggcccattagaagcattcagtgttacgaactctaattttgctccttcttccagaaatacgttttcgggagcaataacgtttacactttttgggattggctgcgattttctgtcttcggtcaaatactgaaaatcttcacggatcgcagcatcgtttttagaaaaaatatcccaggtatgttctacggtcagacaagcgtcattgtatggaatgatttcatacgaatcaaaatcaacttcttcctgattttcattcgtaaaaaaagcaattacatcatcccctttaaaaatagcctgattagcctttaaatctgaaaccatctcagcaagtgcatcatttggtaaatacgctgcattgatcattacattctcttccatttctaccattggaaatttttccgataaataatcttcggtaatggtcgttatagtagaacctaaacgcgcttcccatttctggcgaatcgtcataattccaattaatatgtcggcaacaggtcttgtaaaagtaaaaggtaataatgcattccggacgggaccgtcaaaaagaatgtaattcataaataattaaatttgatacttgttaaaatcttgatttggttatcgggttcaaagttacaattattttatttgtgtcatttgtactgtaacagatatagtttattttttttaaccgcaaagagcgcgaagatttcacacaaagttcgccaagttatatttgcaggtatgcctttttaaaggggtaaagctcgcaaagctttgtaaatagagactttacatgaaaccttgtacttgtttctattaaataaaaaaagccttccgagtggaaggcttttgtataattttaaaccgctattattttttagcgtgttttgcatatttagttttgaatttatcaatacgtcctgcagtatcgataagtttagatttaccagtataaaatgggtgagatgttctagaaatctccatttttacaactggatactcaactccgtcaacttcaattgtttcttttgtatctgcagtagatttagtgataaaaacttcgtcatttgacatgtctttaaatgcaactaatctgtaattttctgggtgaattccttttttcatctttttattttatttattgtttagagcatttttattttgaagcttttccatggttagaaaaaggtgtaaacaacgatactcttttttgtttaaaacttttaattatttttaagtgtgcaaatttacaacttttttcgaattaacaaatcttttaatcaatatttttaacgagtcggcgatttgcattaaaatttttaatatctatctcctgtgtactcgtaattactatatttgtggattaattttaaaacatatacaaatatgatcaatgaagttattaaaaagaatggaattacttacggtgtaatgattggaattgcatctgcattatttactgctacgatatacgcgattgatctgaatctgttcacagcctggtggatgggtatcataggtattgtaatcagtttgacaatcagcattgttttactttctaaaaccaagaaagaattaaaaggagttttccctttcaaagatgcttttaccacttactttatagcagctgtgattggggttctaatttctactttatttaatattgttttatttaacgttattgatccgggcgcaaaagatactttaaacgaaatcatgatcaaatacactgcaaacatgatgcagaaatttggagctcctgcttcatcaattaatgaagccattagcaaaatgaaagaaagcagcccttactcgacttttgaattattaaagggatctgtttttgcaattgttatcagtgccattttcggattaattttcgccgcattttttaaaagcaaaactacacaagaataaaaaaataaatgaatttatctatacttataccgcttcttaatgaggaggaatcactaaaagaactctattcgtggattattaaagtgatgcaatctaacaattactcttatgaaatcatttttgtggatgatggaagtacggatgattcttggaatatcattgaaagtttctctaacgaaaatccgaatgtaaaaggaattcgttttatgaaaaactttggaaaatcgcaggctctgcatgccggttttgccaaagcacaaggagatgttatcatcaccatggatgcggatttacaagatagcccggacgaaattccgggtttatatgaaatgatcacagttcagaaatttgatttggtttcaggatggaaaaagaaacgttacgattctgtagtagcaaaaaatcttccttcaaaactatttaactgggccgccagaaaaacttcaggtgtcgagttaaacgatttcaactgcggattgaaagcttataaaaatgcagtagttaaaaacgttgaagtttcgggcgaaatgcaccgttacattccggttttggccaagaatgccggttttaataaaatcggagaaaaagtggttattcatcaggcccgtaaatatggtgaaactaaatttgggatggaacgttttataaacggctttcttgatttgattacgatttggttcttatcccgattcggaaaaagacctatgcacttgtttggtgccattggatctttgatgtttatcatcggatttttactggcgggttatatcggaatttcaaaattataccatatgtataacggaatgaaatacagcctaatcaccaataatccatggtttttcattgctttgactaccatgatactgggaacgcaattgttcctggctggttttctgggtgaaattatcctgagaaccaaaaacaacgaagctcgttacaaagtagcccgagaggttaatttttaacgcaaaaccttagccccgatagtagtgaaaatcctttttctttttcctttaaaaagaaaaagattgaaacggatagcgggaataagctctataaaaaacttattattttaatacaaaaagacacgaatgatgaatatagcacctaatattctaaatgcagtaaacgaatggctaacccctacatttgatagcgaaacgcaagctgctgttaaagaattaatgacaacctcaccaaaggaactagaggaaagtttttataaaaatctggaatttggaactggcggaatgcgtggtgtgatgggtgttggaagcaaccgaattaacaaatacacccttggaaaaaacactcagggcttatctgattatttacatattgcattcccaaaccaaccattaaaagtagttattgcgtatgattgtcgtcacaacagcaataccttagcaaagattgttgcagatgttttttcggcaaacggaattcatgtgtatttattttcagatttgagaccaactccggaattatcctttgctcttaaatatttaggctgccaatgtggaattgtattaacggcctctcacaacccaccggaatataacggttataaagtatactgggaagatggcggacaaattgtacctccacaggatactgcaattatcgacacgatcgagaatttaggttatgatagaattaaatttaaagctaacgaaagcctgatcgagtatatcgatagcgaaatcgacaaagcttttgtaaaatcgtctatcgaaaacgcaagcttcaatactcctgctaaagcaaaagacaacctacatattgtttttacttctttgcacggaacctctataaaatctattcctgatactttatcacaggcaggttataaaaacgtacacatcgtaccggaacaagctattcctgatggaaatttcccaacggtaaaatctccaaatcctgaagaacctgaagctttaactatggctttggctttggctgataaaacgaattccgatattgtaatcggaacagatcctgattgcgatcgtcttggagttgctgttagaaacaacgaaggcaaactgattttactgaacggaaatcaaactatggttatgatgactgctttcttattgaaacaatggaaaaaagcgggtaaaattaacggaaaacaattcattggatctaccattgtttccactccgatgatgatggaattagccactaattatggtgttgaatgcaaagtaggattgacaggttttaaatggattgccaaaatgatcaaagattttcctcaacttcaatttattggaggcggtgaagaaagctttggtttcatggttggtgatgccgtaagagataaagatgccgttgctgcaaccttattaatctgtgaagttgccgctcaggcaaaagcagcaggaagcagtgtttacaaagaacttcttcagctttatgttgaaaacggtttctataaagaacatttgatttctataaccaaaaaaggaatgcagggtctggaagagatcaaccaaatgatgatcagtttgcgcgaaaatccattgaaagaaatcagcggacaacgtgtgatcatgatggaagactaccagacatcaattgctttgaatttattgaccggagaagaatctgtaatggatattccaaaatcaaatgtattgatttattacactgaagacggttctaaaatttgcgcaagaccaagtggaactgagccaaaaattaaattctacattagtgttaatgcacagttggattccgttgaggatttcgatgcggcagaaagctacctggacgaaaagatacaaagcattattgcaggtatgcaattgaaataaaacaatgagtgacaagcctgacacaaatgacaaacctgaactattagactcgataattggactaatagatcagacacgtcattttgttgccaaaacggttaatcaggaattaacaatactttattggaaaatcggaaaaacgattaatgaagagattctaaaaaatgatcgggccgattatggaaaaaaaacagttcaaatcttaagcctggaattatccaaaagatacggaacggggtttagtaaaagaaacattcatagttttataaaacttaacactatttttcaagactttacaattgtgcagacactgtctgcacaattgagttggtctcatttatattcaatactaagcattgacaacaatataaaacgtgaattctacatccaaatgagtattcacgaaagatggagcgttcgaactttacaagaccgcgtggacagcatgctttttgaaagaactgcgatcagcaaaaaacccgaagaaacaatcattaatgatttagctttactcaaaaacgaaaaactaattagtccggacttaacttttcgcgatccgtatttcttagattttttaggattacatgacacttattccgaaaaagacttagaaagttccatcttagctcaattacaaaacttcatcacagagatgggcagtgaatttgcttttctagcccgtcaaaaaagaatcactattgataatgaagatttttatattgatttacttttttaccataggggattaaaatctctggtcgctattgatctaaaacttggaaaatttaaagccggctataaaggccaaatggaattgtatttacgctggttagagaaaaacgaacaaaaagaaggagaaaacaaaccaattggattaattttatgcagtgagaaatcacccgaacagattaattatctaatgctggacaatgacgaacaaatcaaagtctcagcctatttaacccaattacctgaaaaaaaattattattagaaaagctagaaaaagcaattgccatagcagaaaataacatcaaaaataaatgagtaatttcaaaaaaatagttccttttatatacccgtataaaagatatgcattcttaaatatcttttttaatattttgtatgcactttttagcacgctttctttcatggcattaattccgatgcttcaggttttgtttgacaaaacgaagaagaattatgtgatgcccacttatgacggaattacccatgcaaaagaatttgccgaaaactatctgagctattacattacaaagaataccgatcctaataatcccggatttatactttctgtgatggttgctcttatcatttcgatctttttactgaaaaatttagccgactatctcgctatgtttttcattaattttttacgaaatggtgtattgagagacatgcgaaatgcattgtataaaaaaacattggaactgcctttggctttttattctgaaaaaagaaaaggagacgttatctcccgaatctctgctgatgtcaatgaggttcagacttcgtttttagccattttagaacttatcgtaaaagaacccttaacgattgtttttaccatatgtgctatgttaatcatcagcgctaaacttaccctgtttgtatttgtttttattcctgtttccggatatattatctccttaatcgggaaacaattaaaaaaacagtcgggtaaagctcaacaggaacaaggcagctttttatcgactatcgaagaaacgattggtggtttaaaagtggtaaaaggatacaatgctgagaactatttcaatactatctttcaaaattcaacggaacgttttttcaaactgtccaacagtattggaaatcgccaaaacttagcctcgcctgccagtgagtttatgggaattactgtaattgcaatattactttggtacggaggccaaatggttctgattgaaaaaacactcgacggtccctcttttattgcctatatgggattagcttataatattttaactcctgcaaaagcaatctctaaggcttcttacggggtaaaaagaggaaacgccgctgcagaacgtgttcttgaaattttagagcaggaaaacaccattacctctaaagacaaagcagttgaaaaaacaacgttcgacagtaacattagcgttcagaatatcaactttaaatatgaagacgaaactgttctgaaagacttttctcttgacatcaaaaaaggacaaaccgttgcacttgttggacaatccggtagcggaaaaagcacaattgccaatttgttaacccgtttttatgatgtaaacgacggaacaatttcgattgacggcatcaatataaaagatatgaacttacagtctcttcgcagtttgatgggactggtaactcaggacagcattttattcaatgataccatcaaagccaatattgccttaggaaaactagacgctacagacgatgaaattatcgaggccttaaaaattgcaaatgcttttgaatttgtaaataacctccctttaggtatttacaccaacattggcgacagcggaaacaaactttcaggaggacaaaaacaacgattatcaattgccagagcggtcttgaaaaacccgccaattatgattctggatgaagccacatcagcattggacactgaaagcgaaaaatttgttcaggtggctttagagaacatgatgcaaaacagaacttcaattgtaattgctcaccgactttcaaccattcagaaagcggatgtcattgttgtgatgcaaaaaggtaaaatcgtagaacaaggaactcatgacgaattgattgcccacaacggaacctacaacaaactggtgactatgcaatctttcgaatcataaacataagtagacaggcttagccacaaattatacagattaccacagattatttttctctcaacgaattaaaatcttatatttatctgtataatttgtggcttttttatttcgaatattcttaaatccgtaaaaatgtaccttaatacttcaaacataaaacttccggatgacccggatacaattgtctggaaatacttagacttatctaaattccttgatttattaatgtccaaaaaactattcatgtcccgttctgacaagtttgaggatcagtacgagggtacttttagcgagccaacctttgaagagattaaaaaactggccatagacaatcctgattttttaaattactacaaaacccatcgcgaacaggtagccataagcagctggcacatcaacgaatatgaatcgtttgccatgtggcagattttcaccaaaaacaatgagggtttagctattcagtctaccattagaaggttacagaatgctgtaaaaccggaaaacaatttcgatcaatacattggcgaagtaaattatatcgattacaaaaaagaatacattccgtttgaaaatttatttttcccctttttatttaagcgcaaaagctttcaatatgagcgcgaagttcgaattcttaccgatacttcaaaaagtgacattaaactaaacgatggattaaaaatcaacgttgacctaaagcaattgatcgaaaagatctacattcatccaaaatccgaaaactggtacaaaaaactggtaattgatttaacggaacgcctgggatttgatctcgatattgagaaatcggatctggaaagtgatattttgatatagtttttttaaaggtgctaaggtactgagattctaaggttctgagttttttcttatcagctgtcaaggatataaaaaagccatttaaaaattgattaacaatttttaaatggctttcatcttagtatctcagtaccttagaaccttctaaataggcttataactcttcacttcccatttttttgaagctaagtcaatatagttatagtgtaaaacatcatttttatcaaactgcccgttttgattggtatcttcaatcgttctaaaatacaaacgatttcttgattcgattaaattccagtctaccaattcctgaaaatcttctgaaactttagtaaagtgttcaccactgatattacttaaatacaaggtcttaatatcactagtatcaattttaccatctttattagtatctgagtcggccagagtatagaccataatctgattctgtgttttatcagcaaccgtttttaaataagtagccgtcaaaatcagggctggtttatctgtcaaaggacgtatggaatctgaatcaactttctgaaacttcaggttctgcaaataacccgtgatttcaaattctcctaaattagagattgtaaaacttacatcatttacactcgaagagccataacgggcttttgttcctttttcaaaaacacgcaagtctccaaccggatgaatcaaataacttgttccttccatttgaatcggcaaatcggctatttcaatctgtgtagaatctgtttttgtaacagtattcgttttactggcggtatcgtaaattactttaggtttcttcacttcatccttacaacttgtaagtgttccgatgcttgccagggctatataggttaagatctttttcatgtatgctaattctattaggatatcaaatatagtatttttgattgtattatctagttttattgaattttactagaatccacttctataagttgttcacgcagatacttgcctgcttagtagaaagaacgaaatcaatattttataatctcgcattcagcttcacattaaaaacccttgaggtcatataatttggaattgcatactggtttttagaatacacatcgcgaacccaggtattggtaatcgcattttgattattgaaaagattaaaaatttcaactccaacagacaattctttaaaattcttcaaccatttagccttagcaactttcgtgtttccatctacaaaaactttcgcaaaaccaacatcggctctgcgataatcattcaatctcctttgatacagatatggatctgaataggccggtgctcctccgggtaaaccggtattataaaccagattcaaatacaactttacacttggaatacttggcatataatcctgaaacagcatcgcaaatttcaatcgctgatctgtaggcctcgcgatataacctttgttttcatagttttcttcagtttttaaatacccaaagctaatccatgattctgttccgggtacaaactcgccattcagtctgaaatcaactccttgcgcgtaagcttttgcattattattggcaacatatcgaattctgacattatcgatcgaatacacatttacatccgaaagcgatttataataaagttctgtaacccatttaaaaggacggttccacattttaaaattataatcgttccccaaaacgatatgaacggattcctgcgctttcacatttggatttaccacaccatttaaatccctaagctctctataaaaagggggttgatggtacaatcctccggaaagtcggaagagcatgtccatatcccaatccggttttaaagtaaattgggcacgcggactgaaaacggtttgagtcttaccttcaacagcacctcctgaaacattccaactctgaaaacgagctcccagattgtaccaaacctgactggatcctatttctgattttttattccattgcgcatatcccgaaaagcggtttatggtattaaaatttgtcgctcgtacctcctgatacggtaataacggccccgtataaggcttataaggctgattgttcttcggtaaaaaagcgataggtggattaatcgagaatccagccgaatcaatcatctcccactctacaattcgatcccgaatcgattcacgcgtatatttcaaaccaaattccaactggctgtcatttttccattctttaaaacctttgatttctgcattggcaattaacgcatccaaatcatttcgggcatggctcaattgcgaacctattccacgagtgaaatcaacatttgaggtgtcttcattctctatattacccaaacgatattgtgcgagaatatcaaaatgctcctgttctatggtatgaaaaagggaaccaattaatttcaaagtaaaagtaggtgaagctttgtaagtcgttttcaaggcaccgaagtaggtattgtactgatcccgttccctgccttcataatacacggcaagcgccatcggttgatctatggtcccgaattttgtctcacgggttaaaggctgatacaaatatttgttttgagagatattccctaaaaagctcatttgccattttttagaaatatcataattaacattggtctgaatatctgcaaaagttggagtataattcgtttgcgtgtcctgactattcaccaacaagctattatttctataacgaactccggttacagccgaccatttcttatttttagaaaccgcatcgaccgatatacttccgccaagcaaactggcttcaagcgaagcgccaaactgcgttggttttctataagtgatgtctaaaacagaggataatttatctccaaactttgcctgaaatcctcctgccgaaaagtcaacattctgcactaaatcggtattggtaaaactcaacccttcctgttgcccggaacgaattaaaaacgggcgatagacttcgacttcgttcacatacaccagattttcatcataatttccaccccgaacagcatattgtgtactcagttcattattggaatttacacctgacagtgttttcaaaatattctcgattccggcattggctcccggtattttcttaatagtagcgacatcgacatttgcgataccctgaatcctcttcttacttttagaagaaacaaaaacttctcccatttgttcttcggaactgctcattaagggattaaaaacgaaaatctcatttgaggctaaatgtacggtcagactcatcatttttaaagagacgtgggtaaaaatcaacgaaatctttttacctgaaggcactataatttcataaaaaccatctgaatcagattgcgaaacattcccggaagaactgatatttactccagccacaggatgttgctgctcatccagaataacaccttttacatgagccttctgagcaaatgaaatactggtcgtgcataaaaaaaggaaaacggctattaacttaatttgattcaagtgtttgggttttatttttgttggcttctaaaaaaatgagtctcaaagatagcagaatttcctacattatcaatcacttcaatttttaaatcatttgctccttctgcaaggagagtatcatcaaaagtatgtgttatttttcttgatttactttcatattcaaacagaatccagttcccattaagataaccgttgtacgatttgattccggaagaagcatcattaatggtaaattctatctttttaactcccgtaatccacttgtcctgaattggttttacgattttaatgacaggcgctatagtgtccagaactaatccaaattgccctaatatttttgatttggcagtaaaaacatctccttttctcactgttccgttataactggcagagtttccgctaaatcttccaataaaaagtttatccttcagggtttccggaaacgagctgtccttaatcgtaatggtaaaattggagtgtaccggaacggtatcgtcgtgaacgtaaatacgattatttttaacatcaaagtttaaattaaaatcatcataaaaagttccagccggaaaaaacacagacccattgtctttttcaaaatttgaatctttattggctttaataaagtattttgaagttactggctcctctttgacaattggcgttgccgtgtcgtattcaaccggaacagtaaccgtgcttaaatttccaaaataatccgaaacctcaattctataagtggatgctaaattaggttgggccgaaacaattccacgtaaggaatcagtcttaataatgctcaacgcataaggtgttttcataaagagtttctgaacccgctgacccgactttttatatttaccataatcgataaaagcatttatgtatcgcatctcatcgaaggaataggtattgaattgataattgtaattttgatttccgttcagaaaagtagaaacattaaaaacaccatttttattaaacgaaacatcatcataatctaccgcagaaatcccgaaaccaattctaccattggcttttactttaccagccagataagtcccgtctttctgcaaggcgacattcagtaacaaaggctgtttggactgatttaccgttgcattatccatcggataaacatacacactcgaaataccaggctttttagtgtcttttagatttttatcgaagccaaaaaataggggattaatcacaaattctgttttagtatcccgaatttcaaaatgaagatgcggtccttctgatgaacctgtattgccggaaagtccaatcagatcaccttttgtaaccggtagttcgttgggttttggaaacatttcaatttcataggccttttctttataatgcgtttttgtcacataatccaaaatggatcctaccggagtttgcaaatgtccatataccgaagtgtatccgtttggatgtgtaatgtagatgcatttaccgttgccgaaagtcgaaattttaattctcgacacatatccgtcagcaatggcgtacacctttaatccttccctctgattcgttttcaaatcaaaccccgcatggaaatgatttggcctcaactccccgaaattaccggaaagctgcatgggaatatccagtggcggacgaaaataatcttttggatattgcgtctgcgcaaaaataaacggactaaaaagcagggcaagtaacgaaaatctcataagtaacatttttgctaagataaaaaattaagcagcgaaaaccgagtatcacgccacaaaaatacaatcgattgaatttcattcgtttgtttatttttaatgtaaaaaaatcgataaaaaattgcattaataaaaaggaatactaactttgtaggattaagtaatgaataggatttataatgagtgtaattgccgaaataattgatactcttgaatataaagtcgaaaagctttttgagaaatcgaaaggcttggagcataataatcaggctttacaattagaattagccaaagctgcgcaaattatccagaaacaatctgaagaaattgaagctttgaaaaggcaacatgaaacacttaagatcgccaattcgttactcggcagtgacaacaacaagagagagacaaagcttaaaataaattcattaattcgcgaaattgactactgtatagcacagttatccgattaaccaagacgacatggacggaaagcttaaaattaaaatatcagttgcagacagagtttaccctttaacggttgaacctgctcaggaagaaggactcagaagtgcttctaaaaaaattgatgctatgattaagcaattcgaagaaagttacgcggttcgtgacaaacaagatgttctggcgatgtgtgccctgcaatttgcatcgcaagtcgaacaaaaacaaattgacaatgcgatcgatggagaagaaactatcgaaagaattaaaagattaaatgcgctattagatcaatatctcgaaaattaaacgttcttttacaacaactaagatactgcctacattagttcacaattggtaaactcaacactaacaatttagaatgagcaaatcgtcgctactatagtatgccatgcttcggcttggaaacttgaacagtgagttagctcaaaacttgtctttacgagtttattcaagcaattaatgtaggctttttttatatataaatttttacaaacatggacataataacgatcattatttcaggtattataggaattgcggtaggttttgcaattgctaaaattatcgaaaaaagcaatatttctaacctcattaaaaacgccaaaaaagaagcagcttccattttaaaagatgctaatttagaagcagaaaatatcaaaaaagataaaattcttcaggcaaaagagcgttttatcgaactaaaatcagagcacgaacaagttattttagcgagagacaaaaaagtagcggaggttgaaaaaagagtacgcgataaggaatcacaagtttctaacgaactttcgaaggcaaaaaaagtaaacgacgagtttgaatccaaaacacaggaatacaacaacaaaattgacgttttagacaaaaaacaaactgaagttgacaaattacacaaaagtcaattgcaacagcttgaagtaatctcaggactttctgccgaagaagcaaaagaacaattagtagaaggattaaaagccgaagctaaaagcaaagcaatgtctcacattcaggacactatcgaagaggcaaaacttactgcgcagcaagaagcgaagaaaattatcatcaatacgatccagagagttggaaccgaggaagcagttgaaaattgcgtttcagtattcaacattgaatctgatgatgtaaaaggtagaatcattggacgtgagggacgtaacattagagctcttgaagctgcaacgggagttgaaatcattgttgacgacacacctgaagcgatcatcctttcttgttttgaccctgttcgtagagaaattgcccgtttatctttgcataaactagtaacagacggacgtattcaccctgcaagaattgaagaagtagttgctaaaacagcgaaacaaattgacgacgaaattatcgaggttggtaaacgtactgttatcgacttaggaattcacggtttacatcctgaattgattaaagttgtaggtagaatgaaataccgttcttcttacggacaaaacttattacagcactccagagaagtttctaaactttgtggtatcatggctgccgaattaggcttaaacgtaaaattagccaaaagagctggtttacttcacgatattggtaaagttccggatactgaaagtgatttacctcacgccttactaggtatgcagtgggcagagaaatatggcgaaaaagaagaagtttgcaacgctattggagcgcaccacgacgagatcgaaatgaaatcattactttctccgattgttcaggtttgtgatgctatttcaggtgcacgaccaggagcgagacgtcaggttttagattcatacattcagcgtttgaaagatcttgaagaagttgcttacggatttagcggtgtgaaaaatgcatacgcaattcaggctggtagagaacttcgtgtaattgtagaaagcgaaaaagtttctgatgacaatgctgcgaatttatctttcgagatttcacaaaaaatccaaactgaaatgacttatccgggtcaggtaaaagttactgtaattagagaaaccagagcggttaatattgcaaagtaatctcaatatattattcataaaaataaaggctatcttctaaaacggatagcctttattttttatatcactaccactacggtctggtaatttacacttagctcatcagtcttcgacttcgctcagactgacactcaaatcttcgctcagactgatacccaaatcttcgctcagactcacattttcgacttcgctcaggacgacaaccttgataaaccgtcctaaatattgatactaacattatcaataaaactactgccatgactactgtcactgcgactgagactgcaacaccccctaaatatcgttaaagataattttaaagctcgttcctactcccactgtactttctactgaaatactccctttcattgcctcgatttgattcctggtaatataaagtccaattccccttgcctcctgatttttgtgaaaagttttatacattccaaacaacaaatcaccgtacaccgccaaatcgattcccaaaccattatccgtaatttttaacgacttgtaaccgtccggttcgattgaaaaatcaaaaacaataacaggatctctgtccggatgcgcatactttatagcgtttgttgtaaaattcagtaaaacactttccagataagccgggttaaaattaattgtcaaataccttggaacattatttacaatggtaactttcttatccttgtcataccctctaatcgttgaaattgttttctcaatgtattctgaaagctttaatggcgccacagcaatattgatattactttgtgtctttacaatctgggttaaattggcaatcgtatcgttcagatcattagaaacagttcgcaaatgttctaacatttcgtttacagtttgtttgtcaacatccgcgtcaatgaaatcgaggatcgactttatatttccggcctgcgtattcaaattatgtgaaacgatatgtgaaaaattcaccaatcggctattttgatcactgtacaatttcatcgtttttaagagctccaactctttctctttttgtaaagaaacatcagtatgtgtcccaatcacacgcaatggctttccattttcatccctttcaatcacctttccacgatccagaatccacttataattaccacttgaagtcatgacacgatggtaattttcgtaatatgggatcttattatcaaaatgctcctgtatatccgaatagtactttggaagatcctcgggatgcacaatcttatcccaacgttccggatcatcgaaaatatcagcggaatctaattctaaaatttttaacgacaatgacgaatagaaaaccctattggttaccatatcccaatcccaaattccggcagtagaggcctctagagcaaattgaaaacgctcttcagaaatacgtagtttttcttccttatctttcaattccgtaatatccgaaacatgtccaaaaaagctaacacacccgtcagcggactgctctgttttggcagaaaccttgaaccatcgcatcccttttttaggtaaaacagctctaaattcaacattccagggctttgcttctttacgtgctttgactaaagactgaaaaaacacatcacgatcctgaggaaaaatccggtcgtaaatgaccaatttaatgtcattggtaaactcttttacactaagttcaaaaatatcgtcagctgatttactaaccagagggaaagtatacctgttttcgctgtccacaacaaactgaaacagcagatccggcatttcggcaagcaattttttataaaaattatttacctctaagcaattctcatttccatataaatcaaaaaccatatatcacttatttatgtagattgaaatattaaaacaatgatcccaatagtaaaaaacaaaagctgaaactggctcttttattctctaattaccacaaaatattatacaatatattacttttttgatttaaaaacgacttccggcttcaaaaattacttccgtggatgaaaagataacattacctctttcaaaaaactcctgtctaaatgcacataaatttcggtcgtagtaatcgattcgtgccctaacatcaactgaattgatcttaagtcggcaccattttcaagtaaatgagttgcaaaagaatgtcttaatgtatgtggactaatacttttatggaggttaatttttacagcaagatcttttataatggtaaaaatcatggcgcgtgtaagctgattacctctcctgttcaaaaataaagtatcttcacaacctttttttattttaagattcacccgaatctccttctgataaatctggatgtatttctgagcgaatttacccaccggaacaaaacgctctttatttccttttccggtaatcttaacgaacccttcttcaaaaaataaatctgaaatttttaaagaaaccaattccgaaaccctaagtccgcagccgtacaaagtttctagcattgccctatttcgttcaccttcattggtactcagatcaattgccgcaataagagaatcaatttcatctaaagacagcgtatcgggcaatttccgccctgttttaggagtttcgatcagctccatcggattgtcgtttctgtaatcttcaaaaaccagataattaaaaaaacttttcaatcccgaaataattctcgcctgtgatcgtggattgacttctttagctaccgcataaataaactgctgaaccgtttcgtcatcaatctttatgggagagatctctatactattagtttccagaaaaagacacaagcgttcaatgtcaaaaccatagttttcgatcgtgtttttagacaaacctctctcgatgcgcaaatacgactgataatcttttatgtaacgggtccaattcatagctacaaagtaaaacattttcaggcataaaaaaaccttccggattagggaaggttacaaattttattattggataaaattagaatttgtaggctaaagataacgcaaggttactgtttttagcactatcataataatcatctgaattatcaatatctttatcagaaagcggagataatccgattgtgtaacgaagacctgctgaaaggttatccgtaaaactgtatccggctcctaagttaaaaccaagatctaccgatctggtcaaatctttaatgttattaccatttactttagccgataacaaaacaccaagctgtggacccgcttcaacattgaattttttatcaatgatataatacttcgcaactacaggaatattcaaatagttcaacttaatatccgtgtcattcaatgaaccgtcaactttagttccctgagcagaaaataaaagctcaggctgaataaaaaatctttgaaccacatgaatttctgcaaaacctccaacgtgaaaaccaacaagagctttagtatcttcaacatctcctccaactactgatgaaatattaagacctccttttactccgaatctcgtcttttgtgcattagcaaaaccaaataccattactgccatagcagccaaaattattcttttcattacaatttgttttttgagttattcaccccaaatataaagataaccttattaaaaaagaacttggatgctaattaataaattgtaaataccgttttatgtctatatgaacagacctttcttcttcattataacccaatatcaaatccagaatatcaaaataaacttacgaaataaaaaattttcaaaacacaatttgaactataaatctgactaaataataaatacaacctaaaaaaccgatcacaaataaacttcttaaatagagccaattacaagcctaaaaccaataaaaatgggaaatttagtaattatttaaaccaaaatataaaacaataaattcctaattctgtagttttgactaataaataacattaaaaaaaaacaaattttaaaaccacttttatgaaaaagataatcttagcagctgtattgtttattgcaacttcagctacaattcaggcgcaattagtacaatttggagttaaagcaggggttaactttgcaagccaaccaggagacgcatcattacgaggtgtagcatttgacaaagaaggaatcacaagttatcatgttggtgtcgttgcagaagttaaattgttagaaaaattctcgattcaaccagaacttttatattctactcagggagcaacttacaaatttaaagatgctcaacaagactttaaaaacgaattagcttatttatctgttcctgtaatggctaaaatttatatgacaaaatcattaagtctggaagttggaccacaagcttcctttttagttagtcaaaaaaaagatgtacgatttaatgatgctaatacatttgactttgctcttaatgctggattaggattaaaaatcaccaaaagtatttttgttcagggccgctatagtttaggtttaacagatgcttcatctagtgcagatgttagaaactctgtagttcagttatcagcagggttcttattctaaaaaatatatcacatacttttaccaaaaccgttctattaattggaacggtttttttatttttacaactgttcaatggcgatggcaaaaatcaatggcaatggcaatgtcaaaattcaatgatactatcaatcgtttcacattttacatattacattttacatatcacaccttactatccatgaaaatctgcatcatcaacggacccaatttgaatcttttaggaaaaagagaaccggaagtttacggaagtcaaacttttgaagattattttgcaacgttacaggacaaattcccaaacattgaactttcctattaccaaagcaatattgaaggcgaattgattggaaaaattcaggaatgtggttttacttttgacggaattattctgaatgccggagcctacactcatacctctataggattgggagatgccatgaaagccgttacaactccggtaatcgaagtacacatttcgaacacctacgcccgtgaaagtttcagacatcaatcgtatttatccggaaatgctaaaggtgttatccttggtttcggactaaaaagctacgaactggccattcagtcttttctatgagatatgagatgtaagatgagaaccgtgtaggataggtaactattaccaataaataattttgattaacgatttttgattcttaagtcgtgaccaaatgtattatgttcctggatttactatttaaacaaatacaacatttcagatcacatttcacacttagcatcttacatttaacaaatttttaatagcctcatttttaacttattctatttttgtgagagatacgactctcatgaaaaactatactttacttgcctttttattcttttccgtttcaaatttcgcccaaattaagggaaccgtaaccgatgaaaaagggacacctttgccctttgtatccgtctttgaagaaaacacctatagcggaacgacttctaacgagcagggaaaataccagcttaccgtaaaagagccgggcaaaaacaaaatcgtttttcaatacctgggatataaaactcaaaaaataacaattcctgctgacgcaaaaacgacactgccggatgtgaaaatgtctgaggaaagttttgctttaaatgaggtggtgattgaccctaaaaacaatcctgccaacgccattattaaaagtgctatggcggccaaaaaagacaactccgacaaaattgcgcgatataccgccgatttctactccaaaggaatgtttaaagtcaaagacttacctaagaagattttgggacaaaaagtagatctgggtgacgatcttgcatcaaatttagattctaccggaactggtattttatatttatccgaaaccatttctaaggttacttttgaaaaacctaacaaattaaaagaacgcattatcgcttctaaaatctcgggaaacaatagaggatatagctacaatactgcttcacggtcgacttatgatttttatgaaaacacgataaacttcgacaccaaactcatttctcctattgccgacaatgctttcgcttattataaatacaaactcgaaggtactttttttgacgacaataaacagcagatctataaaatcaaggtaatcccaaaacgcgataaagaacctgtttttgaaggctacatttacattgtagatgacagctttgccatttacgctatcgatttggacatcaaaggctatcgcatgaaaaacgaattcacggaggtaatgaatctaaaacaaaattttacctacaatacacaaaataaaatctggattaaaaatgcacaaaccttagatttcactgccggtatttttggtattaaattctccggaaaatttgcttatatatattccaattacgactttcctgcttcgtttgaaaacaaaacattcggtaatgaaattgtctctttcgaactcaacgcaaacaaaaaggatgatactttctggaacaacattcgtccaattcctctaaccattgaagaaagtaccgattacactaaaaaggatagtctgcaaataatcagaaaatctcaaaaatatacggactccgttgatgccaaaaacaacaaatttaaagttctggatgtcttaatgggctacgattataaaaatacttacaaaagacattctttcgaatataaaggattgttgaatttggcctcgctaagttttaataccattcagggatttaatctggattccggtttctcttttaagaaatggagtgaagacgaaagtaaaacgacttcgttaagtaccacttttaattatggcttttcagatgaacactttaggattaccggagaattcactcataaattcaacaatataaatcacgctacgattagtgcctcaggggggactaaagtagcacaattcaatagtgccgaacccataaccaagttgatcaattctataagttctttattttttaaagacaattacatgaaactgtataatttagagtttgcacagatcaactattcgcaaaacgttctaaatggtgtcagtctcaatgcaaaattgggttatgagcagcgaaaaccgctttttaacaccaccgattattctttcttcaaaagagatgacttatactcttccaacaatccattagctccaaacgatttcaccactcctgcatttgaaaaacatcatttgttcaaaacagctttaagtgcccgaattaactttggaaacaaatacatttcgagaccagatggaagatataattttaaaaacgacaaatttccaacactcttcttaaatgttgagaaagcctttgcagcaagcgaaaagaaatatgagtttgaaaaaataggagcggcagttctctacgatttatcattgggtaataaaggcgttttaggaatgagttttaaagccgccaaattctttaatgctgataacatttcgtttgtcgattacaaacattttaacggaaaccagactcacattggcacaagcagccgttacctgaatgtgttcaacctgatgccttactacaccaacagcaccaacgacagttatttcgaaatgcatttggaacacaacgacaaaggctacattatgaataaaatcccgcttttgaatcttttaaaatcaacgatgaacattggttttcattcactggccgtaccgaacagaaaaccttacactgagtttactgctggtttagacaatttaggatttgggaagttcaaaatcttcagagtagattatgttcattcttaccagggaggcattcagcaaaatggcgttgtcttcggattgaagattttgaatgttctagactaggaaaagttactgagaaactaaggttctaagattctaagtttttccttagcatcttagaaccttagccacttagagtatttcccctcaatataatcatctcctattctataggaagaatccagcaaaatgatttgaaaaagttaccgagaaactaaggttctaagattctaagtttttccttagcatctcagaaccttagcatcttaggtccttagccacttagagtctttctcctcaatgataatcatccggttcaatatgaatcaacacattgcccaattgcggaattttttcttttaaggtatcctgtagtttgtgtgataactcatgcccttctttcaccgaaattttagccgaaactatggcatgaaggtctacgtgatatcgcattcctgctttacggataaaacatttttcggtacccagaatacccggaactgttaaagcctttacacggatttcttcgactaaatcatcgttcagattttcgtccataatttcacccaaggctggtctgaaaattttataactgttgtataagataaaaaaagcagcaaaaagcgccgcccagtcatctgctgattcatacccctgccccataatcaaggcaatcgaaattccggcaaacgccgctactgaagtgatcgcgtcactacgatggtgccaggcatctgccgccaatgatgagctgttggtttgtttgcttcttttcattaccaaacgaaatgaatattctttccatatgataatagctcccaaaacataaagtgtccaggtttttggtaaatcatgcggagtctggatattagcaatactctcatatccgataatagtcgctgaagtaatcagaaaaccaaccaccaaaaacgtaattaaaggttctgcccgaccgtgaccataaggatgattttcgtctgctggtttattcgaatacttaattccgaacaggaccaaaaatgacgaaaatatatcggttgtcgattcgattgcatcggcaattagggcatatgaattgccaaaaaaacctgccagcccttttaagatggctaagcaggtgtttcctataatactgaaataagtagcttttacagctttttgttcatctgtcatttaactacgtttatacttttttttgccacgaattcacgaattatacaaaaaagtataatcttagtttaaactcgtgaattcgtggcaaatatttctacgcttacgctctcacgatttttgctccaatggctctcaaacgctcatcgatacgttcgtaaccacggtcaatttgctcgatattttgaatcgtacttgttccttttgctgaaagagcggcaatcaacaatgagattcctgcacgaatatcaggagacgacatggttgttgctttcagttgagactcaaaattatgtcccataaccaccgctctgtgcgggtcgcataacataatttttgctcccatatcgattaatttatctacgaaaaacaaacggctttcaaacattttctggtgaattaaaacatcgcctttggcttgtgttgctacaaccaaaacaatactcaataaatcaggagtaaatcctggccatggtgcatcagcaatagttaaaatagaaccatcaatatccgtttttacttcgtatccgtctttatgagcaggaatgtaaatatcgtcattgcgtttttcaatggtaattcccaattttctaaatgtgtttggaattaaacctaaattttcccagcttacatttttgattgtaatttcgctttttgtcatcgccgcaagaccaatccatgaaccaatttcgatcatatccggaagaattgtgtgctcacatccaccaaggctttccaccccttcaatagtcaataagtttgaacctactccggtaattttagctcccatagagtttaacattttacacaactgctgtaagtaaggctcacacgcagcattgtaaacagttgttgttccttttgccaaaacagcagccatgacaatgtttgctgttccggttactgatgcctcatcaagcagcatatctgttccggtaagaccttcttcaggagattctactccataaaaatgatcttctctgttgtatctgaattttgctccaagattaatgaaaccttcgaagtgtgtatctaatctgcgacgcccaattttatctcctccaggttttggaatatatcctttaccaaaacgtgccaaaagcggtccaacaatcataatagatccacgaagagctccaccttcttttttgaaagcttcagtttccagataacctacattaacctcatctgcctgaaacgtaatcgaacctggctcatttcgttggattttcacacctaaattacccaataaagtaattaatttattgatgtcaataatatcgggaatattattaattctcactttatcccccgttaaaagcacggcgcataaaatttgtaatgcttcattttttgctccttgcggagtgatttctccttttaaaggtgttcctccttcgattttaaaaattcccatatttcttttttaggttctaaggttctgagattctcaggttctaagactctaagaaaaaatcttagtacctcagtcccttagcatcttagctacttttttacttctgattattatttttctgaaaaggtttcggttttcctggacctttattgtttttattgttttggatttttggttgtcctgccggtgtaatcttattcgacatacgcttattggtacgcaataaatcagttgtatttaaaagctcttctgaactttgaagcaaattgattttacctcccgacaactcatacagatgctcaaaaatcacatcgtcttttacggtatccttgttccagcttaaataagactttttcatgtgattggcaatcaccattaccaaagcatttttcatctcgccatcttcccatttattggcaacatcgatcatgtacttgatattgtttccgtaaaatctgtattttggaaaattctgcggatactgtaaagcatccggttttaactgcaaaacatcacgagacggaattgggtacggcgaatcaacattcaatttgaaatcagacataataaaaagctgatcccataatttatgctgaaaatccggcacatcccgcaaatgcggattcagacttcccattacctgaataatgtatttagcagctttgttgcgtgtttcggcatcttcaattgcagtagcctgatcgatcaatttttgcaaatgacgaccgtattccggaatgattaaccgttgtctttcagaattgtattctaaattaaaaacaacgtcattcgcactttcttttttatatttttcgttcataagttataatgaaactataccttctatggtagaaacttctttgtatttgctaatcacctgctcagcactatgcatggtaacatcaaccgaaacactggtaaatttaccggttttagattttgtggttttgataaccgctcccatactgtcaaaagctttttcaactcgctcaacattatcgtctactgaaggaactatgaatttatacaagtattctgctggccaggtatttgaattgtctaactcaacttttaatctttcgtaaaattcagcggtgtttttttctttatcgttctccattcgtaattaaaaataaacgcaaatatacggttttgatttcagactttcggttttagattttagatttttcagaaggaaataatgattgtttttttactacaaattccactaattatcactaattaaaacaacagataaaaactgtagtttttgcaccattttaaaacaagttactacctaaaaaagcagctgaaattagtggaattcgtggcaaacttttatatttgaaaaacttcacacctttgctcccgatagctatcaggattacgggattgaaccacaccacaatgaaaaaaattatcatctttctttttactactctcacttttcacaacattcacgcacaggaaattaaaactttaacctatttccaaaacgacacactcagactggatttagatttatacctgccccaaaaaaaaacaaatgaaaaaactccattaatcttattcgcatttggaggaggtttttcgggtggagaacgaaccagtgaaaaagattttggcctttttatggcgaaaaacggctacgcggttgccagcatctcctacagcctgtacatgaaaggaaaagattttggctgtaaaggcactttaaccgaaaagataaaagcaattcaaattggcgttagtgatatgtggcaagccacctcatttttaactgagaatgcagcccaatacaatctcgacacctcaaaattctttatttcagggatcagcgcaggtgccgaaattggctttcacgcttctttctgggattacaaactgatgaatttgtacccaaacaatttatctcctgatttcaaatatgccggtttcattggaggctcgggtgctattatggacattaatctaattaccaaagaaaaagcgattccaatgttgttagcacacggaaacaacgacgaaacggttccttacaatgcaggctcgcatcgctcctgcctaccaaatgcttctggctggctgattttatttggatcttatgccgtatacaatcacatgaaagacttacacaaaaatatagaattgattactttttgtggaggcggacacgaattttcgggatatttatttcatgaaggacaacaatatgttctggattttgtaaataacgttttgaaaggcaaaaaaatcgaatcgcatttgattattccttcacaaaagaaaagccccgggaattatttgttttgtgaataatcatttcaccccaatgggggttctataaatattacgtcccgatgggacttatcaatattttctaagatatattggcttttcaaaaaaatcctgaaatctagacatcttttgaaactgctccagcgcagcacaatatctctaacgaatacgatttcccaataccaaaagctccaacggagcgatatatcccggctaaaatttatttctccccaatgagggtcctataaatattacgtcacttcggagcttcttgaaattcaaaaaacaaaagatttttaacaaaccgccgaagcttacatttattttaaattgcgaaatcgttcgtttaaggcaaaataatctttttaaataccaataagtttaggtaaatttgcgctttatttttagaaagtgcaaaaacaaattatagttctcattggtggcccgggaacgggaaaatctactctaatcaacgaattggtagctcgtggctactgctgttaccctgaaatttcaagacaagttacactcgaagcgcaacaaagaggcatcgagcaattatttttagaacaacctttattgttcagcgaaatgttattgaatggccgaattaaacaatttgaaaatgcgattgaagaacctcacaatgtagtttttatcgaccgtggaattcccgatgttgtagcttacatggattacattaatgatgattatcctgaaagttttgtaaaagcctgtaaggattataaatattcaaaaactttcattttaccgccatgggaagaaatttacgaaagcgacaccgagcgttacgaaaattttgagcaggccgaaaaaatccaaaaacaccttgttgatacctataaaaaatatggctacgacttaattgaagtacctaaagatacggttgaaaacagaattctttatatcttagataaaatttaggcaggcgtttaaagttgcaaaactagaaactgatttctaaattttttaactttaaaacacgaccaatgccacaagcacaggaaattctttcaaaatactggaaacacgacagtttcagaccgatgcaaaaggagattattgactctgttttggacggtcaggatacctttgccctgctgccaacaggtggaggaaaatcgatttgttttcaggttccaagtatgatactggaaggcatttgcttagtcatttcacctttggttgctcttatgaaagatcaggttgccaacctgcagaaacgcaacataaaagctattgcactaacaggaggtattcataccgaagaaattatagatcttcttgacaattgccaatacggcaattacaagtttttatatctttctcccgaaagactgcaatcagactggatactggaacgcattaaaaaccttccgattaatctaattgcaatcgacgaagcgcattgtgtttcacaatggggacacgattttcgccctgcctatctgaaaatttcagaacttaaaaaatatttttcaaagattccgtttttagctttaactgcaacagcaacacccagagtcatcgaagacattaaaacagaactgggattaaaagaccccgtactttttcagcaatcttttgaaagaaaaaatattgcctacatggtttttgaagtcgaagacaagctgtatcgcaccgaacaaatcttaaagaaaaacccgcagccctctattatatatgtacgaaatcgaaaatcgtgcatcaacctttccactcaattacaatcattaggttttactgcaacctattaccatggcggactttcggctaaagaaaaagacaaaaacatgcagctttggatgtcggaacaagcacaggttattgtagcgactaatgcgtttggaatgggaatcgacaaagacaatgtaaaaacagtcattcacacacaactacccgaaaacttagaaaactattatcaggaatccggaagagccggacgaaatggagaaaaagctttttcggtattgctctttaataattcagatgccactcaaactgaacagcagtttttaagcattctgcccgataaaaagtttctaaaagcaatgtatataaaactctgtaattattttcaaattgcgtatggagaaggtttagacgagtccttttcttttaaactaaataacttttgcaacaaatacgatttccccactttaaaaacatacaatgcattgcagtttttaaaccaacagggaatcattactttgtcgcaggaattctcagaaaaaattactttacaatttataatcgaatccaaagaggtgattcgatacatgaatctcaatccaaacgacgaggaaattatattagcaattctaagaacttaccccggagtttatgacatcaaaactccttttaatctttcgctgattgcaaaaaaatcacaccatacagaagaacaggttttatctcttttagaaaaattaaaagagaaagaaattatcgaatacaaagccaaaaacaacgattcaactgtgttatttaatgaagtgcgtgaagacgaattaactataaatcgcgtttctaaatatctggaaaaacagaatgaactcaaaaaagaacaactttcttccgtcctctattatataaaagaaaacaaaacctgtaaaaacagattgattctggattattttggagaagaaaccaacgaaaattgtggcgtttgctcctattgcattacgctaaaaggcaaaatcactgaagccgattcgattgcagataaaattctgtatttgctaaaatcaaccgctttgacttctagagaaattcagtctcaaattaaaatggatgccaatgatattattttggtacttcagaaattattagaaaacaatcatatcaccatactggcgaacaataaatacactttaaaatcataatggaaaaattgagaattattttcatggggactcccgaatttgctgtcggcattttggacaccattcttaaaaacaactacgatgttgtgggtataattactgcggcagacaaacctgcaggacgcggacaaaaaataaaatactcagcagtaaaagaatatgcattggcaaataaccttacgttacttcagccaacaaacttaaaagacgagacttttttagcggagttaaaagcgctgaatgcaaatttacaaattgtagttgccttcagaatgcttccaaaagtcgtctgggaaatgccggaatttggaacatttaaccttcacgcttctttattaccaaattaccgtggtgccgcaccaattaactgggccattattaacggagaaaccaaaactggagtcaccaccttctttatcgatgacaaaatagataccggagcaatgatcctgaattcggaaattgcaattgagccggaagaaaatgccggacaattacacgaccgacttatggcattaggaagcgaaactgttattgacactttaaaagttattgaaagcagaaatgtaaaaactaccattcaggaagacaccgccgaaataaaaaccgcttacaaattaaacaaagaaaactgcaaaatcgactggaccaaatccggtgccgaaatcaacaatctcattcgcggtttaagtccgtatcctgcatcctggtgctttttaaaagacagagaagaagaacaaaccatcaaaatatatgaggcaaaactgcttcctgagacacattctcacgaagctggaagtctgatttgcagcaaaaaagaaatcaaagttgcagttaaagatggttacattcaacttttgagtttacagctgcccggaaaaaaaagaatgcaggtagcagaattactcaatggaatcactttttctgaaagtgccaaagtctattaaggtcaataaaacaggggtttctacctgattttgaccaactaacgctctgctttatgaacaaaaaaagcaagttattaacaatttttactaaaaataaagaaaacacttgcaaggaacggatttcctattaaatttgtgtattaacaattttttttaaccaacaattaataactaatattatgaacaaatcagaattaatcgatgctatcgctgctgatgcaggaatcacaaaagctgcggcaaaattagctttagagtcatttttagggaacgtaggagctactctaaagaaaggtgggagagtttcattagtaggttttggatcatggtctgtatctgctagagctgcaagagacggtagaaacccacaaacaggaaaaactattcaaatcgctgcgaaaaatgttgtaaaattcaaagctggagctgaattagaaggtgcagtgaactaagtaagaaagttctctaaactaataatataatcaaaacccttcttatgaagggtttttttttgcgcttcaacgattttatttgggattttagaaattttatgattaaatttaataaaaattgtagccgtatgatttcagaaaaattaaaaaaaggacacctgcttattgccgagccttctataattggagatttatcatttaatagatcggtaattttattagcagaccataacaaagaaggatcaataggatttatcattaataaacctttaaagtacactattaatgacctgattcctgagattgaagcctctttcaagatatataacggaggtcctgttgaacaggacaacctttattttattcacaatattccagagttaatcccgaatagtgttgagatttctaatggaatttattggggaggtgattttgaatcgaccaaggacttaataaacaacggatctatcagtaaaaataacattcgttttttcttagggtataccggttgggatgaaaatcagcttgagaatgaaatgcaggggaactcctggattattgccgataataattataaaaataaaattatcggaaaatcaaccacccatttctggaaagagcaaatcattgaacttggaggcgattaccttatctggtcaaatgcacctgaaaatccatatctgaattaattttcagaaatggattcattcagcttttgtaacaacagctgagccaaattacttgtaaagtccttttttcgatatttcgtgatcggctgtatccccatgatcacattagtcagaaataactcatcagctttttgaagatcaaatggtgaaattatttcctccactacttctatgccctctacttttttagccaaagctaaaatctgcttgcgcatcacaccgttcagacaaccttcagaaaccggtggagttataagttttttacccataaccataaataaattcccctgtaatacctcaactacattttttgtatcgttaagtaaaatacaattggccagaccattttcatgagcaaaaacacttccggtaacatttatcatcttattagtagttttgatcgacgacaacaattgcttcgtcacataaaaatctttatacaaatccacttcgtattcagctgaatttaaagcatataaaacatcttcaagtactgttgcatgaatcaaatacgaaacctcatttgttttaggcaaataaagtccgccctcttttctaaaaacagtaattctggctctggctgatgccgaaattcctttttgctgaacgaggtttaaaatctgctcttcaaaatattccatggtaaaattcatcggaatttccattcgaaccacacgcatggaagccattaatctgaaataatgatcttctaggaacaagattttattattgataatttttactgtttcaaaaacaccatctccgtataaaaatgcgcggttttgagttaatatattatcttcttctgctactatatttccgttaaaattaatcataaaaaaaccctgaattttgttcagggcaaatataaggtataaaatagaattttactaaacagatccaataagatgtttcaggtctgagatctgattctcccacagttgtttagcttctcctacttcttctttatcagcgaaatcaactaccattaacgatacgtctttggtaagttcatcaaccagaatatgcaattcaaaaaaatactccgtgtctttactactttcatccacccatttgaatttgactttttcacctgtttttttggaagccaaacgtgctttttcctgtgagtcattccagataaaagtaaaaaattctcctcttgaattcacattatcagcaaaccattctgataatcctgacggagttgatatatattgatacaatagttgcggcgaagaattgatcggaaactcgatttcgtaacgtatttttggatccatgtgctacttttaatttttttggaaatataagaatatatgtccaaaaacaacacatttttaaaaatatttttttttcttcattttatgcttgtatgctttaatattatttctatctttgcacccgcaatgaggaacacggttctacttgcagtcttggcgaggtagctcagttggttagagcgcaggattcataaccctgaggtcacgggttcaattcccgtcctcgctacaaaaaataaacccctaatcatcaattgattaggggtttttatttaaatttacaccctctctaaccagttgatttagaatgaggaaattaaaaaaagcaactggaattcgaacaatgtaaacaatacgacagcggacttcagactttatacttcttctttttttataagaaaagtatgcggacagttcagaatagtattttataagctaaatcatttataaaaacatggatatagttaaatttaaaatcacgtcaaaaacgataaaagtagaagtacgcaattcgaataactacgtttttaatttcaacactgctttagagattgaaaaagaagacagagaggttttattaagactgtacaatgccctggaccttctttttaaaaaagaaactcatcctgagattaaaaactatatttcacctaatcaaactaacattttggatcagatttctgctgctgataatctggagcaggaaaaataaaccatcgttagtatatcattgaaaatttattttctaaaaagaggaagtctgcacaccgtgagattttctctttttttttgtttttttgttagattctaaacaatttcagaacatccaaattctaatctccggcttttgttattcaaaaataacttctccaaaaccttaatctgaggctcacactgtcttttacgagacgaaaatcaaaaacttacttcaaaatccaaaccaaaatcaggtatttctacttagtgaattcatctattaaaaaacgatttttgttgcgaattacgtgaaaccgtaagttattctctgaaaactgatataacttagcgtattaaaaagaataaaaatcacaaaaagaaaactataatacttaaccataaaataaaaaccaaaaaaacgaaccatggaaaaactttggtgttggcgttgcaaaacagaagttcctatgttacatacagaagaatatcaaattgcaactaaactctatcgtaatggctttgaacatggaaaatgtaatatgaccagaacagagcgattcagtgaacttctaaattactataaagaactaaccggatttaaagaaaccaatcccaatgctattatgcatcatcgaattgatctttacggtccgccttgtgaatgttgttctaaaccttaccgaactcctcaggcaaaattttgtgcagcctgtggacacaaaagaacagctacagtaaccaacagtaatcacacctttacagaggaggaacaaaaatggtggcaaaaactactggaatcaaacaccattagtcagccagtgcttgctgttagtactttaattgcaaaactggatttaaatttataaaaatcaaaaaaacgaaatcaatcctggaatccatttttagttgtactaaaagtggattttctgctttcaggaatatacagctgtttttttaatgtaaaaaatgcgttaaaatagctttcggacaacaattcttcgacaattaaaaatacttttgtgagaacgaaaacacacattggtatggattccgaaaaattcatcttctgcctcgaaggtgttcctgacatcgaaaacaattttgttacccaggtagtaaaaaacctggaagaaatcgctattgatcagggtatcgccagtatttacaaaacttgcgacaccattgaaggcttagaagaaagcctgaatgttttactttatgaagatcacaattttaaagattacgaaattatttatttggtaatgccaggcggacccaacaacatctgcctgcatgattactattatagtctggaagaaatcgcagaactttttgaaggaaaaatgaaaggaaaaattattcattttgccaatttaaaagtacttgatttaaacgacgaagaagcgcagtactttttggacattaccggtgcacgggcgatttcgggttacggctcttcttataataagatagcgagctgtagtaccatcgacaaagctttttttagtctgtatcaggaaaatgacgacattactgaagtggtggaagaactttatcaaaaacattatgcgctttgtaaattacttgattttagactgtattattaaattatgaaaagcaatgccaacggagagataaaaacctatggtgcgaaagtgtttcgtgaaaaatttctgggacaggaaaaccccatgcatttattgtttaaatccagctctgaccattttttttgtctggaaatggaagaaatgatgcagcttcgttacgctgttcctccttcaaaacacagttgtcataccatactttttgtgacttccggagttcatgttgcaaaggttggtttcgaagaataccaaaccaatccaaatgaaatgcttattgttccggccgggcagattttctctattgagcatattaacacgaaacatattggttttatttgccagtttcatccggatgttttgatcggcaaatacggcaacagtgaaatgctaaatgatttcgactttcttaaaattggaggaaatccaaaaattacaatctctccggaccactttcattttatagtgaatctctttgagcgtttacaagctgcttatcttgaaactgaaatcgacaatgctgatatcgttcagtcttatttaatggctttgttctttgagatgaataaaaatgctcccaaaacatctaaaagcaatacagccgcagctgttatttttgctaagttcaaaaaactcatttacgctaatatcaggacgcatcatcaggtaaattattacgcctctttacttaatgttacccccaatcatttaaacaaatcagtcaaatcggcaaccggtaagtctgcagtcaaatggattgatgagaccattttaacagaagctaaatacctactgtatcaaactaccttttctgtaagtgaaatcgccatgcaggtaggacacgaagatcattcttactttagccgtttctttaaaaaacatgaaggaatcactcctattcaatatcgtaaattgattgataagtcctaattattgcttcctgtatcctataaacttgaaaaacgtttattgaaatttgttccgttaaaaaaaacaaattatgatttacgttttcaaaacatccgttgacacaccatcaaagctggaattcgcaagtgcattacttgatgaacggataccaaatgcgatatggaattttgaccttgaggactgcgataatatcttaagaattgacagtgaggctgaaataaatgaaaagattctcaagaatgcgattttcgattgtgtcgaattagaataaattcaaaaaaagtatagtatacaacacttgcctgtttgttagaaaagcttgatttgagtggtcagtaattttttacctctatacccaaaaaaacagggatgcaaaaccaattgcatccctgttcctttttaaacaacttataaactaattactgtctccattgcggatctcctacttttttatcaattaacgtttgatttttaagtgtaaaatttcctgttgcactattcgtaaactgaggatccaacgttccgtaagttcccgaagcatcatattttaccgcagcaacaccggctgtatgtaatgcagccgaattaaaatagttattattcaagaaagtaggtgctgtcgttaaggtctgattggtatacatcgctaatggtgtttcaaaaagcgtgttgcgaattgtcgaagcattactggcaaaacgtacgtacagaattctattagaagctgtcatcgctttatttgaaatggtacaggcatctaccaatactgtagttgttaaacccgtcccggtaatgttaggcgcgttatcgacacggataaaatcgcggcctgtagcacaattgttaaaagtactgtttttaagggttaacgatgccaaatgcgaggttctaaaatcgatacaatcaccttgtaccgttaatatgttagtaacgacactattttcaaccgtcaccgaaacaattttagtaatacctgttgccgtttgtgttataaacgatttcacaaaatcatgaacattacaaccactaattaaaagtgccccataagcagtacttacttcattgtactttacagcatcactttgagttttgtctccgttaatatccaaatcaattaaactaacggatttagcgcctgcgtttagtgtaaatttattatgaagcaaaggcttattatcgcttcttagacctctaatcgtaatcgatttattcaaaataatttcaccaacaaaaacattgtattctcccggcatcaataccaatactgcatcaggatctgccgctgcgatttttgcattcaaatcatccgtaggtttaactaaagtagctgttccaatatcaattcctgtagtaaaagtaaccactcctctctttttggttccgttaaataaagtggcagtataggccgtttctcctgtaaatcccgtaactatcgctgcaccggccgttttttcggctgctgtaatcgtgtgagtaattccacccggccccacagtaatttgggtaacagaactgttaggcgtccatcttaacgtcacttgttttgcttcgatatcggcaggctgcacagggaagaagatttgctccgttaatgttgctgctgttgttatggaccatttcgaatcggcaagtcctgaagcacttaccgcttttactcttatcgaataaaccgtttctccttctaacgctacttttaccggaagttcttttgcggtaacattaaccgttttgtaaattgttttgaaatccggatcatcagcactaaattctaccgtataatgatcaacatcttccttagcagtccagtttaattccaccgtggtttgatttttcactaccgctttcagttctattggagaaaatactctattagctcctatatcttccagcactgcttcattgtaactttcgcaaccggcaattaccaataaaaacatagccagcaatcctttaaatatatattttgcgttcataattctaaactatagtttatttcttaattgtttttagtttccaaaaacccagtcattggctaactgtccattacttccgtcaataaacgtttgccagattggccaaaattgtcttttatcaggattaactccggctttatacaatgtacttattttgttatcatccagcttgtcccagctttttgaggtataatcagtaccctgcgcctgagtttctccacggtttaaaccataaatttcaagtgtagtattatctgctttgtatttataataaagtgttgaaggtacattggcatattcatcactgcgtgcttttaaacgagtcattttaacctttgcttcatctaattttacttttaacaagttccaacggatcagcgcaaacttacgttccatttctccggtaaactcatatttattctcctcaataataccgttcagcatggcttgcttacttgtcagaccgtctacataagcgtctacttttaccgcttggttttgcgaagcaaacgctctgcggcggatttcttttaaatagaccgcagcagatcccgggccttccaattcatttgctgtttcagcagccattaaaagtacctcggcataacgcatataaattttatttaccccatcgtcacttggcgccgaaacgatacgattcatccattcgaaacgatatttaccaaaataccaggtttgtaaatctgtaagttcctgtttggacttgccatttaccgcggctccccatttgtaaggcacacaggtaacatctctgcggctgtcggcctgatcgtagtcataaaaaacaaatggcaacggtccgtttacaccgcctttattagttcccatctgctgaaactgatccgaagcatcatgtcgcaccgcaaaagtgaataacattctgccacgtgtggctgcaaaagggatttcccaaagcgattctcctccggctgttatactttcctgattgtattttctccacaaaccttcaaaagtaggctctagtcgtgcagaaccactggcaattacagaacgacactcgtctaatgccagtttgtacattgccgctactgaaagtgcaggatctgtacttcttctcactccgtcgggatattgttgaaagccactggacatcaaagccaaacgggctcttaaaccttttacaaaagccttgttgatacgctctgtgcttgttgtaactgcagtttcattaggccatgctactaaacttgaagcttcgcctaaatcggcaattaactgtttgtaaatttcgtcacgacttgttttagacacgtagattgtggacgtagaaacaggttcaaaacgagctgggacatcgccccagtttctgatcagatcagcataataaatggctcgtaaagtaagtgcttctcctaacaactgccccatctctgtattcggtaatggattgccgtacttgcgcagacctctgatacacaaattagcacgttcaattccttcatacatcatggcccaggcattttttggcgaattcatttctgtattatccgattttgcatcgtaaactaccagatccgatttgacattgtcactcgaagaagtcaaaagccattctgtatctgtatttagtccttggtaagtcaaaagtcttcctctataagattgctcctctccaaatgagacttttattccatcgacagcaccctgagctaatccggcagtagaaaaaataagctgttcgtctaaggttgactgtgccggtgtatcaaaatattcctccccgaaatcctgacaagaagtcaacaaacctgagatcatcaatcctgctattattactttatatttcattttgtgatacgttttaaattagaaattaaggtttaaaccaaaaaccaactgcctgctgcgtggataagccgaataatcaactcccggtgttagcggagtttttcttcttgttgatacttcaggatccggaccagagtaatttgtaattacaaacacattcgttgctgtaaaatagaatctcaatttacttactcccagcttagaggttaaggcttgcggtgtactatatcctaaagtcagcgtattcagtctgaagaacgaaccatcttctactgcccagtctgtaaacatgaatttttgcatgtaaggagaccacatggtagtattggcatttaacgcttccaaagcggtaggatctgttaccaattgtcccgaagcaggatctaaatttgtccatcttttgccatctgccatctcggtgtttaaatttttgtattgcccgtttcggtttgctgttgaaaactcggctttattggcattgtaaatatcattaccaacgctccagttgaaagcagcagaaagatcaaaaccgtaagcatttgcattaataaccaaacctccggtatgttttggattagaatttcctattactttttgatccgatgctgtcactttattatcagcagaaccatctgtatttttcagcttcatcatccccggctgcagagcacctactacactgcttgcatcaacaactcctgcttttagagtataccttcctcctgtataatcaaaatccgaaacttcatagcgcccatcgctttgatacccgtacattaatcccattggagaacctacatttaccacataatcattcccaacatcagtagacgcccaattggtatttgtcccaaaattatccattactccaagagagttaattcgatttttattcattccaacattcacagaaaagctcaaaccaaaatttttcttttcgatggctataaaattcagggtggcttcaaaaccggtattttgtgtttcacccatatttctaaactgggttttgtaacctgtacctcctaccggaaattcaatcagtaaatccttcgttacatttttgtacacatcaaaagttccgttcagacgatttttgaaaaacccgaaatcaagaccgatattttgcgttacagtagtctcccacttcaaatccggatttgccaaaacactcgatggagaccaatagctatcgaaaccgtttatgaacccatttgtactggacaaataactctgaacggtttgtccaacaggaatgttattgttacccgcctcaccataactaagtcttagctttagaagatttaaccaggaagcatttttgaggaaattctcttcagaaattttccatgctgccgctgctgccgggaaatacccccaacggttgtttcctaaaaacctgctggaaccgtctgcacgaaaagaagctgttactaaatagcgatctttgaaatcataatttaaacgtccgaaaaaggacagtaatttatcatccgcactgtaaaaattgtccactgaaaaaggcgttccctgtgtcgttaatttcttagcctgatctaaatcaaaaaatttcggataatttaaaatcgtggtggttacggtatttgaggttgtcgtaatcatctcttctcctaaaagcgccgtcaaatgatgattgtctcccagaatatttttaaaatcatagtttaaagtattggcatttctgaaacgtacatctttacgatcgctcatgaccatacctggttttcctgcacctatcttggctgtacttgaaaaataagtagaagacccataaaaacgataatcagaatagttggaattgtccaatcctaaatcactttgaaattttagatctttggccagcttccatccaaagcttcctaataaattataattttttcggtactgctggcggtcattgtctgttatagctaaaaatggattaaccagataactgttcacagactggtcatcattatcagtagttaaccccggcattggaacaggtgcataacccacactatgacgcaaacggctgtctaatgatgaagcctgattttgatcgtttgcaccaccaccattgatatcagtatcagagtaacgcactgtaaatccaaggtctattttttcgcttgctttatttttcaaggccaatgagaggttatttcttttaaaatttgaacctgccataattgctttttcatcgtaatacgcatagttgaagttgtaactaagcttttcattccctccacgaattcctaaatcacggctgtttacttcaccgcgacggccgtaaacctgcttttgccaatccgttccttttaaaccgttatacagatcacgatcctgccagttaccaaaatacttggtataggaacttggattgctcaagatcgttttatccgtctgatccaataaagcgtattcgtattgccattttacaaaatcatcaaccggaagaacctcgatttctttggccatggttttcattccgtaaaacatattatagctcacagccatttttccgtctttaccggttttagttgtaataataataaccccgtttgctcctcttgatccatagattgcagtagaagaagcatctttcaaaaccgtcatcgattcaacattagaagccgcaatatcactcatgctgtttaccggaaaaccatccacaataattaatggggaagcatcttgtgttaaagacccgcctccacgtactctgattttaatatcggcatccggtgaaccttcgcttgaactaacctgaactccggcgattctccctgttaaagcttcggctatattagaaaccggaacttttttcaggtcatttcctgaaatggaagaaacagcccctgtcagatccgattttttaacggtaccataacctaccacaaccacttcatttaaagcatttgaatcttcgattaaaacaacatcaactttcgtttttccgacagcattgacttctttggttttaaaacctataaacgaataggttacaactgctttaggattggtcaattttaatttgtaacgtccgtcaaaatctgaggaagttccgttttttgttcctttctctaatatattaacacccggcaacgtgagtcctgcagcatccttaacggttccttcgagtgtaatactttgcgcatgcatttgattgccggccagtaagcacaataagaaaacaactgcaaagcaacaatttgctcctttgttaaataaatctttaaaattcatgattgattgtttaagttattaattgtttgttcaaagtggttatttcgtttttatcaggttacctcttttttaactgattgtcaaagcctcacttctaggacaacagtttcttttttaggttgtttttgaccttcgaaataaggtccttttttaagccttaaaaaaagttgtaatcgattacacaaacttaaatatttttttgagataaaaaattaaaagtcataaaaatttcccaaaataaatgacatacccaaaataaagtcgcctttttatatcacaaatgcaatttaagttcgatataaatagtaaatatatttttatttttttagcggattgccgtggttttacaaaaaaaacaatcgattacaacgaaactcattgcgatattgtcaactcctttttcctgctttttttaatggctgttttttcaaaaaaaacaacaaaaaacagtattcctgtcacaaaaaatatcgcttttgaagtcacactattactacaaagacaccatattcttactaaaaaaacacgacatcccacaaccctgcttaggaggaatcaaaaaacaataaaagacaaaaaaaagagtctttgaacccgataagttcaaagactcttttttaatataatttgcaaatattaatcctgacgaattcttctttcaatctatgtgaaagaaatgtatttcttttatatattcttttgcacacatactaatatctatgtttctatgtgtttaagcattctaagaaaagattaacttcactaatttgctactgttacttttaatagatcttttttgcactcagctcccccttgggctattggcctaaacacatagaaacatagttttctagtctgatataaggttgtctatgagaaatacatttctttcacataacacaaattcaagcagtaacaatagcttctcaaagattacaacagcatcattacgctttttgcaactgcaaattccctttatgtttctgcattaaagcaaaagtgattaccattccgcttaacgccataaccaaaccgattaaatttggcgaagcataactgtaccctgcagacaatggcaaacctcccaaaaaggctcccaacgcatttccgatattaaaactaccctgcagcgctgccgaagcaatcatctcagcatctttagcagttttgatcattaacatctgaattggagcaatcactgaaaaagaaacggcacctgttaaaaaagtcagaaataaggatacatattgattgaaggagaaaaagtataccataattaaatcaatggccataacaaacagcagtgccaatacagtaggtgccggagaatatttatcagccagtttacctccggcaaaattgcccaccagcattcctaaaccagctaaaatcaaaatataagacacatcctcaggcgcaaacttcgaaacatttgtcattagaggtgcgatataactaatccatgcaaaaagacctccgaatccaatggctgtgattccaataattagccaggcttctgttttcttaaaaaacaataactgggttttcatatggaccgttccgctcttttccagatttggcatccataacgaaataaacaaaaacgttagcaaacctactgcggcaattaaaacaaaagtataacgccagataaagttatgtcctatataagtaccaataggcacacctattaaattcgccagtgtcaaacccgaaaacataatggcgatcgcctgagcctctttacccttatcggccaaacggctcgcaactacagcaccaactccaaagaaggctccgtgcggtaatcccgaaagaaatcttgaagcgaatagaaaattatagtcaggcgcaataatcgaaagagcattaaatacggtcagcatcaaagccaaaattaaaagcatttttttgggcgcaaaatttcttcccagaattaccaataaaggcgcaccaatgacaacgccaagtgcataagcagagattaaatatccggcaaccggaatcgaaactttcatatctgaagcaatatcaggcagcaaacccatcatgacaaattcggtaattccgatagtcaaacctcctaatgagagtgcaataagactttttttcatttttttgtaatagaaaggaatagaatttctatgctgcaaatttaacaccgttaaacggaaaataaattgtacatttacgacataaacttgtaaatttaagttatgcctaaattcaatcagtttgaaaagcttgtcattcatgagttcgaagatgacatattcccccatgttccgcacactcatacctattatgagattatttacatcaaaaaaggcaacggaattcaccatcttaaccacaacttattgccttataaatcaggtgatctctttgtgatttctccggaagacgagcattacttcgatattaaaaaaagaacgcgttttgtttacatcaagtttactgacaactattttgattcgaacaggaatcttttttgtgatgatttactgctgaacactccggaggattttatgcggaacaaattgctaaaggaaaccattttaaaactagacgatccttgtaaaaccatcttaaaaaatacgatcgaaaacattaccgcctacaattgcaagacggatgtctcgagctcgccaattgttttttatcagattctttccatttttggattgattaaagaaaccatccgttgcatgaatctgcaactgaaatcaactcctattgacaacgaacaaatcgcaacctatattcatcaaaacatttacaaccccaaattggttcagattaaagttattgccgatcattttaatattgcccaaacttatttcagcgcttactttaaaagaacttttgccataagctatcgcgagtacattcaccatctgagaaccactttaatcgaaaaacgaattcacaacaaccagctgcccattaaacaaattgctcatgaatttggttttaccgatgaaagccacctttcgaattactttaaaaaaaggaaaaacatgaaacctaccgattataaaaaactgtgagtatggaatttcaaaaaacgcaagagtaaaaaaaaaatacctaaatttgtaattctaaaacattttcgttgacaggaaaaatttacatagtgtttctaatcatgacctttggcttcttactgatgcccagtgaaggttatgcctgcggaaaaacgaacgcgaaaagttcctgcgaaaagaaagcagtttcaaaacatgagacggctgatacttctcaaaaaaactgttgccaaaaagataacggctcaaaaaatgaggagcacggctgtaaccgaaaatgtgatcattcgggctgtaccccatcaggacttcaattcagtttaatgacaaagaatgaatttgagtttgaaaaaaatctattcaatttctctctggagaaaacaataccttactacaaaaacatccctatttctgatggttttacatctatttggtcacccccaaaaataaaataattgtatctctgacagccaaagttgcgctttgtaacgaaacttttatttctcacagaagaagtaatacactgtgcgtcagattatttacgagaccataattagcaataatcaatcttaaattatttaacttagagggaatttaacgctctaataaaatcagatacaatgaaaaaatcaattttaaccatagtaatagtaatcttagtcgctttttctgctaatattattctggccacttccataaaaagagaaactacaacaatagaagttgccgattcaagtcagttacaaactgtttatgatgcttattttacggtaaaagatgccttaattaaaagcgatgccaaactcacttcggcaaaagccaaagatttactggatgccatcacggctataaaaatgaaccaattaaagggtgacgaacacaacacctggatgaaagtcatgaagaaaataacggctgacgctaaaagtatttcggctacaacagatcttaaaaaacagcgcgaaactttcaaatcgctctccaaaaacacttacgaacttattaaagtgtcaaaatcagatcaggcggtatacaaacaacactgcccgatggtcgatgccgactggctgagcaaagaaaagacgattaaaaatccttattacggttcgtcaatgttaacttgcggaagtgtggtagaaacgatcaagtaaatatgacactctgcatcaaaaacatggtgtgcagacgatgtataatggttgtggagtctgagttaaaaaaactcggactccatccaatttctgtggtattaggtgaagtcaaactacaggactctatttccgaaagtcaaaaaaaagtgctgctcaaaagtttacaaacactgggctttgattttattgatgacaaaaaaagcaagacggtggagagcataaaaaaaggcatcgctgacctgattcattctaaaaacaacgaccacaaagtcaacttgtctgatcacttaattaaaaacctcggccaggattacagcacactgagcaatttattttcagaactggaaaacacaactattgaaaaatactttatcagccaaaaaatagaaaaagtaaaggggctactcctttatagtaaactgtcgttaagtcagattgcagatacactaaactatagcaatgtagcgcatttgagcaatcaattcaagaaaattacgggctttacacccactagctttaaacaattgcaaggacaaaaaaagcattgagattgagaatttgtaaccctttttcatttattctaacccgtaactaaaagaatttgaaagattttgttttgagcagattctgcagattgagcagatttacattttaaaaatttgctcctaaataatctacaagatctgttcaaaatcttttaaaatctgcgtgacaaaaaaattacggttcctataaatgattacaccctttacataagccctcgcgagctttgtgactggctgttttttgaaatcttacaaatcattctcaaaattgtacaaccctaaagtactctttacttcagaaatttgcattgtaatacttaaaacattgaaaaaatgacatttacagcccgaggaaaaaattacgacaatgggaacctgaagcggaatggagatcaaaagcacccaaataacgcagctaaaaatcaagttcggctttagtaattgtaaacactttacgattacgaaatccaaacctttaaaatatcaatatgaaactacagactattatactcctctttttaatcacttttagtgcaaaagcgcaaaaagtggttcgttacgatctgcatgttcgggacactattgtgaatttttccggaaaagaaaaaagagctcttacggtcaacggacaaattccgatgcccactctgacttttacggaaggagatatagcagaaatttacgtccacaacgacttaaaaaaagaaaacaccgcacttcactggcacggattattccttccgaataaggaagacggtgttccttatttaacccaaatgcccataaaaccaggaacaacgcacaaatacagttttcctattattcaaaatggaacgtattggtatcatagccactcggggttacaggaacaaattggtttgtacggtctttttatcatcaataaaaagaaagacgatccgaccattagaaaaggaatcgatgatttaccgacaattccggttattctgagtgaatggacggatctgaaaccggaaaatgtacagcgaatgctacacaatgccgacgattggttcgccataaaaaaagggacgacacaaagttatgccgaagccattaaacaaggccactttgccacaaaggtaaccaacgaatggaaacgtatgcatgccatggacgttagtgatatttattacgaaaagtttctgatcaacggtaaaaacgaacaacaactttcacaatttaaagcaggcgataaagtaagactgagaattgcaaacggaggcgcttcgagttatttctggctgacctacggcggtggaaaaataactgttgtggcgagtgacggaaatgatgttgagcccgtagaagttgaccgtttgattatttcggtttcggaaacctatgatgtggtggttactatccctgaagataaaaaatcctttgcatttttggctacagccgaagacagaaccggatctgcttcattatttttaggagcaggaacgaaacagtctgtcaaccatcttccgaaattaaaatatttcgaaggaatgaaaatgatgaacgatatgatgaaaatgaacggtgacatgaacgatatgggcatgcaaatgtcgctgaacaaaatggatatgaatgccgttatgtatcctgagattactggaggcggcgagcctatgaaaatggaagatcactccaatcacaacatggaaggcatgaacatggctacagacaccactgaggttgccggaattactactctgaattacggaatgctgaaatcaccaaccataacaacgctgcctaaagatgcaccggtaaaagaactgcgctttgagttgtccggaaatatgaaccgttatgtttggagtttagacaataaagttatttctgaaaccgataaaatcctgatcaaaaaaggcgaaaacgtccgaatcgtattgtacaacggatccatgatgcggcaccccatgcatttacacggacatgattttagaattttgaacgaacatggcgattactctccgttaaaaaatgtgattgatattatgccaatggaaaccgataccatcgaatttcaggccaatgccgaaggagactggttttttcattgtcatatcctgtaccacatgatggccggaatgggacgtatttttacttacgagaatcaggcacccaatccgctaattcacgataaaaaaatggccgataagatgctaaagatggacgatcgtatgtttcattttagagccgaaaatgactttgcttccaacggaaatgacggagaagctcttttaagcagtacacgttggagtattggtaccgaatggagattaggttataacaacaaaaatggtttcgaaactgagacacacattggacgctacataggcaaaatgcaatggtttatgcctttcatcggttttgactggcgttacagaaaaatgggaattgacgaacaggaacaaaatatgtttggacagaagaataccaaagaccatcgttcggttttaagcgccggtattgagtacaccttacctatgctggtaaaagcgcaagttgaggtttttacggatggaaatgtccgaattcagtttgagcgaaaagacattccccttgccagacgtctgcgcatgaatttgatgtggaatacagacaaagagtatatggccggtttgaaatacatcgttggacgaaacttcggaatcacaacgcattatgacagtgatatgggagttggtttcggagtaaatctcaattactaaacagatcggcgtatctactttaactcaaatgtatagcctagaaatgctataataaccttctctttatgccccgttttaaaatgaattattacaaaaacattaactaaaccgtaagagttaactttagaaagtctttttatatttgaatttctatcttcaattaaaaaacaaaatcgtaaaaccttaaattaaacaaaaatgaaaaacttatttgccgttttagctgttgctttatttacaattggtgttcaggctcaagacactaagccagctccaaaaaaagaaaaagctaaaaaagaatcctgttgtaaaaaaatggacaatgcgaaaactgacactgcaaagacagatactgcaaaatcagacaagaaatcttgttgcgctaaaaaataaacgaaacttactttcaataaaaaagaggctatcattagcctctttttttgttccccgtcctttcgactaagatcaacgataacagaaaaaatctgcgaaatccgctaaatctccttgcaaaaaacgccccaaccaaagggaacgcgtaaagcgattgtcacaaactacattcgacatctatcatttgactttaaattgcatactaattcatgaccaaatgcctgtctctattcccttaaccaagctctaaatttcatcaaaggtcatcattgctcctcccagatatctgaacatttgcaaaaaataatttgcaaaatcacttcgtgcgttccctttggcggaatttggcgaaaaactatttaacgcgaacgctccactcaaagtccatttcagaaacgggagtaccactttcgtctgttccaattgatttcatccagaaggtttgtccttcaccggttttgattgtttctttaatcgcatcggctattaagtgtccgtcattacaaacaaatgttattcttcctgtcgcctttttggtgaaatttcctttattgtttgcgactaacatcgaaatctttttcccgctttgttgaatctgagagattaccaatgctccggtagttaactctgctgccattgcctgaacggcaaaatacatcgaattgaacggattttgattgatccatcggtgcttaacacttacgacgcatctgtctttgtcgattgcctttacacgaacgccacaaatgtaggccgacggcagtttgaataatacaaatttattgagtttagaaaccgataatgccatgatgtttatttttttatgtaaaaatacaaaaaaactatgcacgcacaataaattacaactactttcaaggactaccaataaaatcaggtactccggatgattttcagcgttttatccgtacttgaagcattttaaacttgttaatattttgttaatatttggtactatgcaaaacaagatactgtcttttagatatatatttgcataagaaattactatatacttttaatcatggaaacaacaacaccactcatcatggaaacttcatcagaaaagaacactgcaacgttcacacacttaagcactttaagtcagtacatcattccatttgggaattacattttcccgatattaatctggacgagttacaaagacaaatcagaatttgtaaaccaccatggaaaacagactttaaattttcaactaagtcttctgctttacactctggttttggccttaattgccatcccgatcttcatcactgtttttttacaaaatattcctatggaagctgtatttaacgacgaagatttcatcatcagaaattttgactttaatggaaacattgcattattaagtattggagcaacagccgttttactttttggactattaaaatttgttgaattctttttagtgatttacgcttcaataaaagcatcaaacggagaattatacaagtatccgataacaattccttttatcaagtaggccttgacttcgctcagtctaacataaaaattaaaagttatagtcggaaccttattgaccatcatcagaaaagttccgaaatcaatcatcaatcatcaatcacccgagccggaagggcaaaccggcatctcaatcatcaatcaatcatcatcaatcaaaaaacgaattgttcaatcaaaaaaaaacaaaatgaaattatgaacattgaaaacacaaaagcacagatgcgcaaaggtgttcttgagttttgcatcttatctgtattaaaagaaaaagatgcctacacatcagaaatattagacactttaaaaaacgcaaaattactagttgttgagggaacagtttatccacttttaactaggctgaaaaacgacggtttgcttaattatcgatgggaagaatctacttcaggaccaccaaggaaatattatggattaaccgaaataggacaaacatttttaaacgaacttagcggtacctggacagaattgtctgacgccgtaaaactaatcaccaatcaaaatcaataagtcatgaacaaaacagtaaatattaacttaggcggtatggtttttcacatcgatgaagatgcatatctaaaactgacacgctattttgacgccataaaacgatctcttaccaactcgtccggacaggatgaaattatcaaagatatcgaaatgcgtatctcagaattgttaattgagaaacaaaaaagcgataaacatgttgtaggactgaaagatgtggatgaggtgattaccgttatggggcagccagaagactatattctggaagatgaagaaaaaacaagtcagtcttttaatgattacggaacaagaaagcacaaaaaattataccgtgacaaagaaaaaggaatgattggtggtgtagcaaccggtttagggcattattttggaattgacgctgtttggatcaaaattatcttcttaatatttgttttcgcaggttttggaaccggaatcttagcgtacttcgttctttggatcgttactcctgaagcgattactacttcggagaaactggaaatgactggtgaaccggtaacgatctccaacattgagaaaaaagttcgtgaagaaattgaaaacttatcggacaaatttaaaaatgcagattatgacgcaatgggaaaccaggtaaagtcgggagctgagagaataagtagttcatttggagactttatcatgacggtttttaaaatattcgctaaattcttgggagtcattttaatcatatccggaatcagtactttgattatgttgttaattggagttttcactttgggaactaatgtttttgttgattttccatggcaaaactttgtagatgccggaaactttacagattatccgctttggtcatttggtttattaatgttctttgctgttggaattccatttttctttttgacccttttaggtttcaaattgttatctccaaacctgaagtctattggaaacattaccaaatataccttgttagccatttggattattgcagttgctatcgcaatcagcattggaatcaaacaagcgacagaactttcatacgacaacaagatggtcgagaaaaaatcaatcaacattacttcaaaagatactcttttcgtaaaattcagatacaatgattattatgccaaagatctggaccaccatagtgattttgaatttgtacaggactcagccaacaatcagttgatctattctaacgatgttcgcttacatgttttacctacagatgaagctgctccttacattcaaattgaaaaaacagccagaggaaactcgtttatcaatgccaaacaaagagcagaaaaaattagctacaagtttgagcttaacggaaaccatttgattttagacaattatttcctgacagatgtaaaaaataaattcagaggacaggaagtcgatgtatatttgtacttgcctgaaggacaattattcaagccggattcatctgtacaagattatgacgattctgacaacgattttttcaacttacactttagcggtaactacaattacaaagtacaaggttcaaaaattaaatgtcttgactgccctgccgaagaaaacgagtatggagatgagtatgacgacacgactgaagaaagtgttatggagaacgataccgtaaacgaagtttctattaaagttaatggaaaagaaattttaaacggaaagaaaaccaacggaagattaaccactgataaaaacggagttgtaatcaaaattaactaagccatgataaaaataatcattcatattacaaaattcattattgcagcagttactgcattattgtttgcctcttgtaactttaatgtgaatagtattaaaggaagcggaaatgttactactgaaaaaagaaccatacctggcaattttacaaaagtgtcggttagcaatgcgatagatcttgttattatccaatctgattctacggaagttgttgtggaagctgacgataacatacaaaaggaaatcacaacaaaagtggaaaacggaacgttatacatcaaatgcaaatacaatagttttcaggatattgccacaaaaagggtaaccgtaaaaatgcctgttatcgacaaattagtcgcctggagcgccgcatctatcatgagtaaaggcctaattcagggtcaggatattaatattgaagcttcaagtgcttcaactgtagatgtgaatatcgaatcggataacattacttgtgattcagacagcgggagctctatccgcctggaaggaaaagcattaaaaatgcaggcttcagcttcaagcggtggtagtgttagtgctcgtaaactattggcaaatgaaattcatgcagaagcctcaagcggaggagacgtaaatgttcatccaattgtaaatctgaaagcctcagccagcagcggaggaactatcaattatgacatcactccaaaaacaattgaaaaaacttcaagttcgggaggaacgattagccagggataaaccttatttatctgttaaatgtaaaaaaatcattcatcgaaagtggatgatttttttatatttgtccaaatcaaatcttagaattaatgaaaaagaatacagcccttcttctattattattattgatcacaaccttaactttcgcacagcgaagagaaaaaataaaaggatctaaaattgtaaccacttcggtaaaagaagttggtgaatttgatggcattgaagcggatgacaatctggaagtttacctggaacgaggagaaaaaaacgaaattagaattgaagccgatgataatctgcatgaaatcattggaacggatttaagagaaaaagtacttcgcctctatactgccaaagaaagtacgatcttcaaaaaattggttgttcatgttatttataccggttcattaaaaaccgtaattgccaaaaatgaggctgtagtctatgccattcaggagcttaagttagacgatatcacttttcatagtttcgattacgctaaattactgctcaacgtaaattcgaaaaaattcagtttgtttgcagatgacagatccaaaaccgaactaaacttaaaatcagaagatgcttccttacagctaagcaaaaacgcttcgattaaaacattagtttctgccataaaattcaaatgtgatttgtaccaaaaaacaactgccgctattgaaggtatcgccgaaaaagcaacaattcgtttggacaataacactgtttttacaggaataaaatttactttaaaagaggctaatgttaccaccgaaggctcttctgtcgctactattttagtggagaacaatttagccatcgcagccggcgataaatcagaggtctcactgtttggaagtccaaaaatcgaacttacccgttttagcgaagaagcaaaactcatcaaaaaaccaagtcctgtaaaagcgaaggcaactacgccattgcagggctagattcttagattcttagattcttagattcttagattcttagattcttagattcttagattcttagattcttagatgtttttaccgtaccgtcctgagccgtaacttcgatcgcaatacgattcgccttagcatccacattatttacttccagattatcaatcgtctgagaaggatttccactggtcaccgctaccccatttacttttatagtcgcatgggtatcagtagtgaccggcgtaaccgtgatactgctagcggcattagatactctggccatataatctgtagttcctgaagagaaaaccggatccaaagctcctgaactaatacccaaattgcttaaagtagcgacattactcagtggtgtagtgactgttgccggattaccggtgctggttgtggttaaataggatggataatcccctccatcatcaataaactccataaccatgacctgataagttgttccaggcgccaaaccttggacttctaaatcagaaagcgctgacccatagcgaattaagcaccaacctgttgtactgatctgatctcccaagccaaaaatagtgcttcctctgaaatataaattatccggtacaggtgtagttccatcgcctgtacctgcacgcattaaaagcatcctttgatttccatttccattggtacaatccacagtagtagtggttgctgtggtcttggtaaaagtaagattagtggcctgaatcgttggcggcgcagaaagcctgagcacttttatggtgtaggtttttaccgtaccgtcctgagccgtaacttcgatcgcaatacgatttgccttagcatccacattatttacttccagattatcaatcgtccgagaaggatttccactgctcaccgctaccccatttacttttatagtcgcatgggtatcagtagtgaccggtgtaaccgtgatactgctaacggcattagatacactggctgtataagctgtagttttggaggaaaaaactggagtaagtgctccggaactcaggcttacattactcaaagtagcgacattgtttagtgtcgtcaatgttgcagaattaccagagttgactgttcttaaataatatatatgaccactagctccataaatcttactaacgaacacctgtacctgataggcagttccaggagttaaaccagtcacctccgcattagtcgtcatagtatcagcaacacaataccagccagacgtaccaatttgatctcctaaaccaaaagcagtattagctttataacgaacatgatctaccggaatggcattggagttggtgcttgttcctttgcggataaatactgtactaaaagttgaattcccaggttgccaactaatagtcgattttgttcctgtagtattcgtaaaagcaagattggaacattgtactataggcggagcctcctgcgccaacatcgtctgaaaaaccgacaaaaaagtgattatataaccccaaaaaggctttttcagaaaaaagaaaataaaagtacgagtcataacaaaatgttttttttaagtttttaaactaaatcgaaatttcttgcagtgccattttttagtacttttagcacttttgacgatgcaattatctatttaacagttaaatcgctacaaagacaaaggaaccagtaaaaaaacaaagaagagtttgcaattcaataaacacaactacagatgtaataattggtcgattcatgtaatacacgggaaagtgagcaacaaaaaaggtttggagcactagttatcttgagatgcttatttgcaaaaaaaaaagaaaatgaaaagtaaatcaaaaggcttttgtcggggtggcccgattcgaacctgcggacttcccgattccgatcgggacgcgataacagttcagctatatgatttcagtttaaaccaaaaaaaaagtctttccaaaaaatgaaaagacttttgtcgcagtggcccgattcgaacctgcgaccttcccgattccgatcgggacgcgataactgtttaactaatatgattttggttcagctatatgattcaattcagctatatgatttcggtttaaactcaaaaaaaagtccttccaaaaattaaaaagacttttgtcggggtggcccgattcgaacctgcggccttcccgattccgatcgggacgcgataactgtttaactatatgattttggtttaaaagcaaaaaaaaagtctttccaaaaaatgaaaagacttttgtcggggtggcaggattcgaacctgcggcctcctgctcccaaagcaggcgcgataaccgggctacgctacaccccgtaagcgggtgcaaagatagaactattttttacttatccaaaacaatttcaaaaattaagagccttttttattttctaaataaaaccaaggtttcaaaagctaaatactttttattgaattaacacgaaaaaagcttaaaagccttcatcatataaaaatgttattatatttacaaaatcataatatcaaactcatttccaaatggaaggttttcttttagccctgttgttttgctttttattttatattcttaataccataaaaagtcgttttgatcatcttgaagatgatattcaaaaactcagtaaaaaaattgatttattaaaaacagtggaaaaatctactgaaaatatttcggttgcccccattccggttgtcaaaaaagaagatttcaggacaatcccggaacaatcgaatcaaaatattcctgaacctgttcaacccgaagttgtcgaggaaaaaatttctattgcaacaccaacagaagaaattaagactccagaacctgaaaaactgcatgctccggcagcattacaacctgctccggcagctgaaaaaacagttccaaaacaaatcgctcctgtagcacctgaaaaatcattctgggagaattttaaagaaaaaaatccggatctggaaaaatttatcggagagaacttaattaacaaaattggaatcttaattcttgttttaggaataagctattttgtaaaatatgccatcgacaaagactggattaatgaacccgcacgtgttggaattggcgttttatgcggagcaatagttatgggaatagcgcataaattacgtaaaaactatgctgcattcagctctgttattgttgcaggctccattgccattttttatttcactattggaattgcttttcacgattatcacttgttcaatcaaacggttgcttttagcattatggtaatcattactgcttttagcgccttaatctccttatcgtacgacagaatcgaattagcggtactttctcttattggaggatttgccgttccgtttatggtcagcaccggtgcaggaaactacgttgttctttttacctatattgcgattttgaacatcggaattctggctatcgcctcttataaaaaatggaatctggttaatattctttcttacatctttacggttctcttgtttgcagcctggttatcgaaggatttaaattctgacaagccgcattacgccggaggttttctgtttggattcctcttctactttatcttcattttaatgaatatcattaacaatatccgatcaaaaggcgagttttcaaaaactcagcttactatcctggcaagcaatacatttttgttctatgcagctggaatggctatcttaaccttttatcatactgaattaaaaggtctattcaccactgctttagcactcctaaatttgatctacgcctggtttttatacaagaaattcgaactcgaccaaaaagcggcttatctgcttattggactaaccctgacttttgtaacattagcgattccaattcaatttgaaggaaattatatcacgctattctgggctacagaagccgttttattactttggctggcacaaaaatcaaaaattacaagctatcgatttggtgctgtaattgttcatatcttaatgctttttagtctgatcatggattggaatcattactacagtagcgatctgcctctaagcatcgtcataaacccaatttttataactggtattttcgctgtagcttctttgtctgcaatttggtatttgttaaaaaatgaaaccgaagattcaaccctcttcaacatcactttcaatccggaaacgtacaggaaatttgtcgctgcagcagctgttggaataggttatttcactggtttatttgaagttatttatcaatctaatcattatatcgaaaacctatacagttcgattgcactccccattttatatcacttactgttctctgcattatacactacatttctaatcgggagaaaaacagcagcaggatatcagggcgccttgttaatagctctttcaaatattgttttatttaccttctggttttccaattatccatttttagaacacagggatattattactttaggtgttggaacatcaattgctttttatcttcattatatttcgttgctaatcatcgtttactttggttatcaattgtttcagatttacaaaaaaacaaatttcccttttcttcctagtcgatacctcatctggggtgccgcctttttcatcctttatatttgtagctcagaagtaatgcttcacggacttgtggttatgaattcgtctgtttctcttcacgacctacaaacaagtacttacacaggctacaaatctaatttaccttatctgcgtgaattagtagcaggagactctattcatctggcgagtattaaaataattaaaaccggatttcctattctttggggagttctggcttttgtgtttttaattatcggcatcaaaaaacaacaaaaatctttacgtattatcgctttatctttgctaggattaaccattctgaaattattcttatacgacatcagcaacatttccgaaaccggaaaaatcatatcgtttatcctcctgggaatattaattttaattatctcctttgtatatcaaaaaatcaaagtcttagttattgacgaagacaaaccaaaaaacaacaatgaaactaactaaattcatcttacttctattttttgcaaacctttcttttgggcaatatcagactaccggaaaaataaaacccgtttcggagaaaggttttcatgaaattgttttatctcccgaaattagatcttattccaaacaagatcttagcgacatcagattatttgactcaaaaggaaatgaggttccgtattttatccagactcctaaaaacaataggctaaacacttttacagagtataccattatctcaaaaacagtcactcccaaaaaaagcacctctattatcattgcaattccgtctgctaaaaaccacaatcagatctccctttttatcgcaaattccgatgccgaaaaaagatatacggtttccggaagtgatgatcaaacagaatggttcggaatctccaattctcaaattttagatgacttaagcagtgcgtcagaaactagtgttattaaaacgatatcatatcctttaaacacctaccgttacttaaagattgattttgacgatcaaaaaacgcttcctgttaacctcttaaaagccggtaattttaccaaccagattcatcaaagacctttacaggaaatcacttccggcaaatcaactgtaacagagaatcattcaacgaaagaaactcaaattcatgtgctttttgatgccccgcaaatcatcaaccaaatttcatttgaaattacaaaacccacttattacagccgtaaagctgttttatacaaaaaggaaaaaagacaattaaagagaaaatcaatagaaatagaagatgaaatcgcaacgttcgaattaaattcagatgtaaaaagcatctttacgatctcggaaatattcgaaaaagagctttttataaaaatagaaaacaacgacaatcaaccgctatccatcttaaaagtaaaattcaatcaaaacccggtttcgatagttgctgaactaaactcaaacgaaaattatattcttaaaaccggaaacaaatccatgaccgccccggaatatgacctttcttcttttaaaagtagtattgcctccaatttaccacaaacgtttatttacgatatccagcaaaaaacgcccctaaagaatcaaacgaaaaacaaatctttttggcagcaatcctggtttatgtggctatgcattttgttaggaggtacaactattttatttttcacaaccagccttgtaaaagatttgaaaaagaaaaatgagcagtaaaatttacccccacttttaattccatttttctgactaaagtaagcttttgctctttttagactaaaagaaatcaaaaaatagaacgaaatttcgttcttgttttttgattatccttaaaatcaattccagaaaacacgcaccatacaacgattaaacgaagattcacaaatgttaacaaaatagattttcagaaaccataaataattgtatttttacggttcaaaattcagaaaataaatgggcaaaatcattgcgattgctaatcaaaaaggaggcgttggaaagactacaacatctgtaaatcttgcagcctcattaggcgttttagaaaagaaagtattgttgatcgatgctgatccacaagccaatgctacatctggccttgggattgacgtagaatcagttgaagccggaacttatcaaatcctggaacacagtataacaccaaaagaagccgttttaaaatgtacagctccaaatgttgatgtgatacctgcacacattgaccttgttgccatcgaaatcgaattggttgacaaagaaaacagagagtatatgcttaaaaaagcgttagaaagcgtaaaagacgaatatgactttatcattatcgactgtgctccttctctaggtttattaaccttgaatgctttaacagctgctgattctgtggttatcccaatccaatgcgaatattttgcacttgaaggattaggaaaattattgaacaccataaaaagtattcaaaaaatacacaacccggatctagacatcgaaggattgttactaaccatgtacgattcaagattgcgtttgtctaatcaggttgtagaagaagttcaaaaacactttaatgatatggtttttgataccgttattcaacgaaatgttaaactgagcgaggcaccaagttttggggaaagcatcattaattatgacgcaaccagtaaaggagccgttaattacattaatttagctcaggagattataaagaaaaacagcaaatagtttttatgacaaaagcaattaaaaaacaagccttaggaagaggattatcagcgttattaaaagatccggaaaacgacattacatcagtagaagataaaaatgctgacaaggttgttggaaatatcattgagcttgaaataagtgctatcgaaataaatccgtttcaaccccgaagcaattttaatgaagaatcgttacgcgaattagccacctctattaaagaacttggtgtaattcaacctattactgttcgtaaattagatttcaacaaatatcagctaatctcaggagagcgtcgtttacgtgcttcgaccatagtaggcttaacgcatgttcctgcctatattcgtattgccaacgacaacgaatccttagttatggccttggtggaaaacatccagcgtcatgacttagatccgattgagatcgcactttcctaccaacgtctgattgacgaaattcaactgacacaggagcaaatgagtgagcgtgttggaaaaaaacgctctacaattgccaattatttacgtcttttaaaattggatccgatcattcaaacgggtatccgtgacggttttatcagcatggggcacggtagagcaatcattaatattgaagacttagacattcagactgatatctaccaaaaaatagtaagtcagaatttatctgttcgtgaaaccgaaactctggtaaaaaactatcacgaaagtttaaaaccaaaagcagaaggaaaacctaaagcagagtcttcttttgtggttagagaaacacaaaaaaacactttcaacgattattttggttcgaaagttgatataaaagtcgccggtacgggtaaaggaaaaatcaccattccatttgattctgaagccgactttaacagaataataaaattaatcaacggatagtgaataaaattgtccccataagcctattgttctttctcataggaaccgtttctctttttgcccaggtaaaaaaagacacggttttggttgttaaagacactagcaaattgcaggaaatcgatccgcttacacctgcaaaagcagcattctactcggcaatcttaccgggtttaggtcaggcatacaataaaaagtactggaaaatccctttggtctacggagcgattggtacgagtttatacttctatcttgacaataacaaaaaataccacgattatcgcgaagcctacaaacgaagactggaaggctacaatgacgataaatataaattcctggacgacagcagacttattgccggtcagaaattttatcagcgaaacagagatttatcactattatttgtcgttggtttttatgccttaaacattatcgacgccaacgttgacgctgcattgattcagtttaacgtaaacgaaagattatcattgcgcccggaaatttaccctgacgctgtaactttcagaccaaatgttggactaacttttaattaccacttttaaataactccggttacttgaattttaaaaaaaaatacacgaaatgaaaattgcgcttttaggatacggaaaaatgggtaaagtaatcgagcgaattgctttggaaagaggtcatgaaattgttttaaaaaaagatgaattcagtacttacgacggactttcaacagccgatgtcgcgatcgatttcagcgtccctactgctgccgttgacaatatttccaattgctttcatgctaatgtacctgtggtttcaggaactacaggatggttagaacactatgacgaaatgatatcgctttgcaacgaaaagaagggcgcttttatttcgagctctaactttagtttaggggttaatattttcttcgaactgaacgaatacttagctaaaatcatgtctcaactggattcgtataaagttacgatggaagaaattcatcatacacaaaaactggatgctccaagtggtacggcaatttctttagccaaaggagttatcgaaaacagccaatacactaattggactctagacgaagcaaaaaacaacgaaattcatattgaagctaaaagaattggcgaagtaccaggaactcatactgtaacctacgactcccctgtagacagcatcgaattaaaacacactgcacacaaccgcgaagggtttgctcttggagcggtaatcgcagcagaatggcttgccggaaaaacaggaatctattctatgaaagacgtattaaatttaaaataaaccgttatgaaggtttaggtaaaatttcaaattaagtcccgaacctaaaactttaaataaaatattatgacactatatctttggtttgtatttttcttagccgttcaggttattcattttatcggaacctggaaattatatcaggctgccggaagaaaaagctgggaagctgcgattccggtatacaattcaatcgttttaatgaaaataatcagccgcccaacctggtggactttattgcttttcattcctattattaacctgattatgtttccggtggtttgggtagagactttaagaacgtttggcaaaaaaacaactttagatactcttctaggtattttcactttaggcttctatatctattatgttaactacactcaaaaattagtgtacaacgctgacagaaaattaacttctgaaaataaagcaggagacaccctgagttctttactttttgccgttatcgtagcaacattggtacatacttatttagtacagccttatacaattcctacttcttctttagaaaaatctttattgattggggatttcctgtttgtaagtaaagtaaattacggtccaagagtccctatgactacggttgcattaccaatggtacatgactctattccgtttgtaaaacaaaaatcctatttgaaatggccacaattgccttatttcagattacctgctttagaaaaaataaaacgaactgatattgtcgttttcaactggccggtagatacggttcactatttttacgaaccaaaaggaagaccgggtgtcatcaaaccaattgataaaaaatcaaattacgtaaaaagatgcgtaggtattccgggagacagcttatcgattaaagatggatttgttttcattaacggaaaaaaattagttttaccggaaagagcaaaaccgcaatattcttattcagtagccatagacccaaaaatccctattgattttgaatctttggtaagagagcttgatattacagacggagcaggatttaaaagcgaaaaaagagacactctttatttcagagctttaactgaggcaagtgcagaacgtctaaaaaatactcctggcattactgccgttacaagagaaattgaccacggaaatgacaacgctattttcccgcacatcaacaaatggaatcaggataattttggtccgatttatattccggaagcaggaaaaacagttgccttaaccaatgaatcattaccattttacaaagacattatcaccacttatgaaggaaacactttgcagctggatggctctaaattcttaatcaatggtaaacctgctacaacttatacttttaagcagaattactattggatgatgggagacaaccgtcacaactctgaagacagccgctactggggttacgttcctgaaaatcacattgtaggaaaaccggttttcatctggatgagctgggatactaatggtaaaggaatcaacaaaattcgttggagcagagttttcacaactgttgatggtgaaggccaaccacaatcttactttaagtatttcctgtttattcttgcagcctactttgttggagaatatttctggagaaaaagaaaacaaaacaaagcataaatataaacagtcaaatgtttaaaagtctaaagtcataaagtaacgtttaaagaaccttgttttatgacttttgacttttgactttaaaaactttagacttcatgaactctcttttacttcctacttattttccatcgatcagccactttgcagttatggcacaatctgaaaatattacttttgaaatggaagataatttccagaaacaaactaacagaaaccgtacctacatctatagcccgaacggaattcaactactaaatatcccagttaaacattcgaaatcagctcatcagaagacaaaagatgttttaatcgagaatgaatttgactggcaaaaacagcatttcaaatcgttggaagccgcttacagaagttctcctttttttgagttttttgaagatgatattcgtcctgtttttgaaaagcagcacacttttttaatggatttgaatcttgaagttctggacatcactaccaagtgcctgcgcatgaaattagcgttcggcaaaaccacagagtattttcatgaggcagaaaatatctccgatttcagagttttggctaacgggaaaaaagaccttaattcattcgaaaagtacactcaggtttttgacgacaaacatggttttatcaacaatttaagtgttttggatttactttttaatgagggtaagtttgctatggattatttgaaaacacaaaaactactggtttaatatttaggtttaaccgcaaagaacgcaaagatattcgcaaagttcgcagagttttatttatgacagctttgcgaactttgcgtttgtataaaatcttatcattaaaaatccttgcatgctttgaggttaaactcattaagaaaaactcaccactccttttctttttaatttatttcggccttatcgttaagtgcttttaaatcgagccatcttgataatgtttccatgattcgttttttatcattctccggaaaatctttcactctcgtggtgtgactccccccgggaagaaccatttttaatgcatctaatttggaatctggtgttggagcacacgagtaccaggtgtcgtaaccgccgtagatgtacaaaattttattgcctttattctctacatattttcgcacttctttgatgtatttcggattgtattttatcactactcctttaggtgcaaatcgatcattggaagtacttttcaccacttgaagcaaatcggcaaccggagaaaaatcaaaaccatagtaccccaattcttttaaatgctgataataggatggcaaataatgaaaatacatcttatcgttataagttcttacgcctgaaacctcatccaaataggcaaacagctctttcgggctcgccgttactgacggtatagcctcgcattttcctccccattgccaaaaagaaaaaggaaattctaaaactgcatattctaatgcctcagcgaaaggtacttcggtaaaagtcattttcttttcttctgcatattgttcaaactcctttaaaacggcttctctattttctaaaactgttctctgaaaggctgtaattttagccctgcattctgctgtccccactgttttagtatgctctactgttcggggatcttcctgggtattaattaacggtgctacataaggcattgccacatcaacatcatccggatattttgatttgtaaatcaaagccgtttcaccgcctttacttattccggttgaaatccattttccggtatacaactgcttcagttttgttacaagattgtgatagtcggcgatagcctgatcgtttgttaaatattcccatggaagtggttccggtcgtgactttccgtaaaagcggtattcgactgcaatctgatttgcgtttaacagtttactcacctcacttttgatattattggtattgtaaccatgcgtttcaataaccattgggttattaaaattcagatgcgagaggtaaacataatgcttaaaagttcctttttgcggatttttatgatctaaaggttcatctaaaatcaattggtacgactctgcataaccttctaaattttctatcgttgtgatttcggcttttggaaacaataccgtgagcttctgatacaaatctgatttattctgcgctgacgcaaaatacgaactcagaacaacacacagaagcaatactaaacgctgtatacttttcattttttaagttttaattgatctttaaaaatacaggcattacaacccgaaatccaatagtatattacccttaaattattctattttatctactttaagttaaaataccactatcccaaaatattggcttatttttaatccaaaataaaaaaaacaactaaccttaaaataacagctatgaccattggagttggcggatctaacgcaattgcagaattagaaaaaatacaaaacatgaccctgaatgtcaaggccattcagccggaggaatatcaaatgcgtattcagaaagcggtgtcgcttatgaaaacagcaggttttaagtccttattcgtgaacgcaggaaccaatctatactattttaccggaaccaaatggaatccctctgaaaggatggttggagccttattgtttgaagacggcagcctggaatatattgttccgaaatttgaagaaggtacttttaggaaattcatgaaaattgaaggccatttaaattgctgggaagagcatgaatcaccagctgttttatttggaaagatcctggagaccaaaggcataaacaacggtaaaattgcactggacgaatctgccggttattttttagtagatgctatcgtaaaagccaatccaaattacgaattcgaaaattcccaaccggttacaactggctgtcgtattcagaaatcagccaatgaaattgcaatcatccaacaagccaaagaaattacgatggtggttcaacgtgccgctgcacgcattttgtatccgggcataaaagccgaaacggttgtcgattttatcaatcaggcacatatcaaagcaggaattgcttcaggttcttatttttgtattgtgttgtttgccgatgactctcaatatcctcatggggttactactcctcaggatttaaaagataacgatgttgtacttatcgacacaggctgtcgtttggaaggttatctgtctgatatcacccgaacttatgtgtacggaactccaacagacgcacacatcaaaatctggaacctagaaaaagccgcacaaaaagccgcttttgatgccgcacaattaggagcaacctgcggttcggtcgatgatgccgcacgcaaagtaattgcagcaggcggtttgagtgccgattacgaattgccgggattacctcatcgcgtgggtcatggaacaggattagatattcacgaacatccgtatttggtaagaggcaatactactgttctgcaagaaggaatggtagtaagtaacgaacctatgctttgcatcccgggtcaattcgggattcgtcatgaagatcatttttatatgaccgctgaaggtccaaaatggttcactactccaatgcacagtattgataatccgtttggcattggcatcaattaagctgtatttaattttaaaaagcataaaaaaagggaaacaatatcgtttcccttttcttctttacaaaccaaattatttatttaaccaataactttttagtatctgtgaagcttccatctgtagctaccactatataaactccttttctaagacggtgtaccggataagaaactgtgttttttacaatgtcaataacatttcctgtactgtcgtagatggtgattttagtatccgccaggtttaaattagcgaagttgaaattaaccacttccgaagccggattaggatacatcgtaaatgattttgtaaaatcagtctgatctgctcctgcacttccgttttgcaaatcaatggtcaacggagcactccagttacttgcctcagttgcatttttagctctaactctaaactgataaacggtttgtgtgccttgtttcggaacccataaataataggttgtggaagttccgaaagtggtccagcctgtactagcattattcaactgtacttcataacttgttgcattcgccactgtattccatgaagcataaaatccggatgaatacactcctgaattcccaatattggttggtgtcggcaaagttgtcggattaggtgtcgaacctgcaacaaccgtatagtcttccacatcaccatctccaatgtttccacaagccgacgggttcgcataatatttcattacaatgcgcattctggtcgttccggtaaacgcaattggtgtaaaactgcctgtagctgttccggtagaagaaattccgtcaatcactttttcagaagcatcaaaaacattgtttttattataatcgatccacactccccaatattctaaataagatcctccggaaaaacctgccgccagactaacatttgtagctactcccggagttacagttacagttttagacgtaagattagcatacccccctgcatctttaccggatgtattggtaaaacttccaatagttactgaattgatgtattcgtaattattattcccctgagcagtacaatacgctgaacctgtcgcaagagtggccgtaacctcattagaatacgcagagtaaatgctatttgcttttgcacgtactcggtatttataagtacttccggctgtcagacctgtgttggtatacgtagccgctgtacttggtaatgttgttatttcggcaaaaacattatctgctcctgctctttctactacaatgtttgtcgcattagttgcgttgtttacccatgtcaattgtgcctgtaagccggtgttgtttactgcagccgtcagacttgtaggtgccaaaacagttacaggtgcctgagttccggcctgaatggattcgtttggcttcgtattgtaagcatagtctaaaacggaataaccaactccacctgcttccactttaacatgcatccagccataacaggtacggcctctgcttttatattcaaaaccgatataacctgtttggttgtcccaggctgtataacttgctgttcttaaatctaactgatccggatatgccgctccaggggttacaaaattacttgcggcaccaattgtagttccctctgtaattaaactaatgttacgtgtacctgtaggtcctaccagtcttttgccataagtttctacttttaaagcagcagcagcaaactgccatgctccatactccgtattatctccaatccctaaatcaaaatactgccaggtttgggctgccgaagcaacataatcagaattgtttacataaaaaactccgtaaggtgcatcaaatttcaaattgatcgtttttgatgatgtatcaagagtcgcaattcctcctgtgattgcagcatctttgaatgtaatgactacagcagcatcatttgcaggaagatgtgtgcttgcttttccggtaaaggaaaccactactttattatttccctgaagcgtcaatacagcggttaatcctgaaggaactcctgtaatagcaaaatcagttccagcagttaaggttccagtactttttgtaaaagttccattgttagtagataacgaaattgtactggtcgtggtaacaccaccgtcatttgcctccgcctcgtacagtatactttctgataaaacaaccgccgttttgttagtcacaccggtataaataggcgcattgggttgtgtattgtaggcatattcagaaatgatgtaaccgtctccatttgccgcaacgcttattttgaaccagccatagcaaggcaatccatcgattttgtattcaaaacctacatatcccgattttccatcccaggcggtataactcgctgttcttagatctaattgatttgggtatgctcccggagcagtcatattacttgtcggaccaactgcggtgttttgagctaataaggtaatgtttcggctaccactctcgcaagttaatcttttgccataagtttcaatttttaatgcattggccgcataacgccaacctccgaatgaagtgtcgtctccttttgcaatatcaaaaaacttccaggttaaatttgaagagatgttaatatccggcatgtctacaaagaagattccataaggatccgtaaatcttaaattgtaaaacaaagcagtacaagacaaacctgcagttcctcctgtaaatgccgcaggtaagaatgtgattccggcagttgtattttgcgttgctgcatgatttgttgcttttcctgaaagtgttaccgtcacctgaccatttgaatttacagtaacaactggtgtgattccggctggaaaagtatgtgtaaaatgggttcctgctgacaaagttcctgaacttagtgcaaaagtctttcctccgctaaaagttaccactgaggctgtatcaaaagatccatcattgataacagcttctttaaaagtagttccggttgctactaaactgctttcagtcgtgttcactccggtatcaattaagttttgcggctgccagagcgtaatccttgccggatgctgtaaggctgccagcattctgtcaatctgaccctgggtgtacattttataacagccttgtgcaccattgtaccccatataattttcgatgtttactttatctcctgtacaattagttcccggtgtacaagccagagtatgcttagcatcttctgcaggagtgtcggcaacttcatctgtgccggagcagcctccttcaaaagtgtgaatcaggtttaagaaatgtccaaattcgtgtgtaagggttgctgaaaattctttgctgtaggagttgtcgtaaagataagctccgttaaaaacgacacgtgctgtgttattggccgtcataccagaatcaggataccaggcaactcctgaattgttaaaaactccttcgttatacaaatcattctgaatataaacgttcatatattttttattgtcccaggcatccgcagcaatctgatcatcgtaaccaccgccatttccgtaaccgtttttggccgcatggaaaacaacacccgtggtacatccgccattagggtcttttttcgccagtttaaattcgatgtttaatgttcctcttctcgcttgaaaaaagggctcaactgtttggtaatcggcattcctgccattgaaatcgtcatttaactgagccaaatgattgacgattttttcataggtaatggtttttccgctttgaacgtctccataaatatggaaaaccacggggataacataagtaggtgctgctgctgtttttgaagtgttgcttttacgctgaagggtaaatgttttggtaaaggcttcaaaatcttttttttcctgaagtgatttggggctattccgatacactttggcgttttcttctgtcgtccggcaaggaagtccctgcgcgctcattttccctatcgaaaaaacgagcattaatactagtagttttgttttcattttttttgggttaatttgttgccaccaaaattaccagcatagcttctattttattgatactatgttatttaaaaacaatatataattaacaactttttaactttaaaaaaacacataattaaaaaataaaccaaataaatcaagcattcacaaataaattaggctattttctaaataaaacaaaaccaagacttcgacttcgctcagtcggacaataggattcaataagtaagacctgaccttcactcagtcggacaatgtaatgcaaaaagagacttcgacttcgctcagtcggacaatgaggctcgggaaacaagactttggcttcgctcagtcggactatgcaatgcaaaaagagacttcgacttcgctcagtcggacaatgaggctcgggaaacaagactttggcttcgctcagtcggactatgggattaaataaaaataaaaaaaccggaacctaattaaaggccccggttaaaaacaggaaaactaattcaaattaaaatttatcccagaaaatttttgtagtcatcaaatcccctcctatggcagcagcagcagcctcataatttcctttgtttaaggttttatcaaaaagagagtaaatagtacgaaccggtacttttccttttgccgcatcaacagcagttgaaggggctaacaatacaggaaaatccagtcttctgtattctgtccatgcctcaaatcctctgttgtaataagcaatccaaagctggtaagcgattttttcttttgttgttccggcagcagttgcaaagtcaacatctgttctgtttacataggtctgtgcatcagcattcgcaactccccaaaagttcatgcttgccaaaattccttttttataatattcttccggagttcctcctacgctaaatcctctgtttgcagcatctgccaaaaggaaacaggtttcagtgtaatcaaaaattactcccgggtttgttctttctttcaatcttgatcccatgtttgaaaaatcgccataacttacttgtttggcataaggagctcctttatagctaccgccttttttagaatttggattaaagaatatatcacgtcttgggtcattttttccatttaactgattcacaaaatattcagtcggaatcgtttgactttcgtttaccaaagtatcatacaacggattcatatcaacaagtgatgaaaaatactggaacaatgctgtttcctcttcactggtcattactcctgaattgtaagcactttctactattgtttttgctttagcgggctcaatgtctgcaaggtgtaatccaagttttaatttcacactattcgctaatgttttccattttgtcacatcgcctttgtaaattaaatcggctttaccaaagctctctttactgccgtccatagccgcaatagcagcatctaatctggcagccagatctaaataaatggttttggcatcatcgtattttggataaggatacagattaatatccaaagcttcactgtaaggcacgtttccaaacaaatctacaagcgcctgatacgccatcacaatctgaacgtcaagtactgcgattttgtttttcttaattgcagtatcaacagctcctaaagcttctttgctctttatgtctttttgagcgtttaccaaatcctgcaaaacgtctctgtataacaacgttgaaagagaacttcctaaatttcttctttccatattgtagttcacctcatcggtataggttgtggtagaccaatattgagcatatcctctaaaattgttgctgtttactgaagcattggtcaggaagtaggcataatttacctgtgcattgctcataagtgcccccggcaaaacggtggtataggcttttttgtcctgatttaaatcttctaagttatcacaagaggctaccgaaagtaagatggctcctgcaaaaaatatcgtttttactattttcatttttttttgtttttagaattgaactttcatattaaagttatactcttttgaggtaggcaaaactccagtttgaaagccctgaagatttcctgacgaaagtcctgcttccggatcagcgtacggcagatttttatgaataatccacaagttgcttccattaactgacaaaatcatgttggtgataaaagtcttcgccaggaattttgatggcaatctgtagcttaatcctaattcacgtaatttcacataagaagcatcgtaaacatattgctgttccggcatggaattgtaaaatgaatatccatttgctccttctacacttaccactttatcatttggagttccgtcttccttaaccccagacaacagaatccctccgccgcttgcgatcggatttctttgtggatttcctaaatggttgttcgaaaccgtactttcataaatacctgtagtatgtccgaaacgctggtctaatgaataaacgtctcctccctttttcacatcaatcaaaaagttcaatgagaaatttttataggtaattacgttgttcaaaccaccaatccaatccgggtttatatctccaattgttgctccggccgtttgtaaatatcttccgtttgaacgaattactttttctccgtttaaataagtaaatccggaaccgatcaactgtccaattggttttccaacctcagcaacatatcctactccctggaaagatcctaacgaaattctgtcagctcctcctaatgaaattacttcatttttattggtagaccagtttacttttgcttcccagctaaaattggctgtttttaccggaattacagacaaggtcacctcatatcctttattttgaacatcacctccgtttatccaggctctggtgtatccggtttgtgtaggtgtttccactgaaagaatctgattggttgtattgcttttgtagtaagagaaatcaagacctacacgattattgaacaatttaagttctataccggcttcaagacctcttgtcagctcactttttaaattagagttacttttattgttttctgtagagaaacgaattccgtcaggtccaaaattatcaccttttggataagttgctgcaatcacagcaaacggagcatcattacctgtttctgcataattcaaacgaagttttccaaaagacaaccaatttgttttaatgtggttactaaagatataagttcctgtaatcgaagggtacgtataagtactattacttgatggtaacgttgaagatttatctacacgataacttccctctaagaaataagtttccataaaattgaaactcgcattagcataaacactgttggtaccgatggctacttctgactcaccagggctgttgattttatcaatagaattactcaaagcataaattccaggcactaccagtccgccatttgtcgctgtaaaaatggacttactcactgaacgtcttgaattagctccaagcattccgttgaacttaattccgtctgtaatattagttttaaaattcatgatcaaatcgaagttgatctctctgaacgttttatcaaatctggtatattgtccaagtgcatttggtgttctttttgatcccacagcaatgcgctcttcctgtaactgattataggtatctacagcacctttacctgtaatctcaaaccaatcggtgatttgtgtattcaaagcaaagtttccgaaaaaacgatcacgatttaaagtattgtagttgttgtatctttgaaaataaggattgtcatgaaactgcaatgttaaatcatttggtcctccaacactccaggttgtattttttcctgtaagatcataagcatcttttaaatcctgaaaatctacacttgtagaataccattgtctgatactgctcagatagttgtttccaccatcaccgtaaccggtttcattcattcctttcgcatctgcttttaaataattagccgatgccgaaattttagttttaggcagaatgttatagcttccggagaagttaaaattgtctttacgattgttactgtttggcaaaatcccctgattcatgttatagttcgtataaccaaatctgaaatctcctttttcacctgatccggtaaaagcaatattattaatgaacgtcaagctcttttggtaaaaatcatttggatttttctttactgctgtccaaggagtagcttttccgtaacccggtaattcagggtagaaagaactccagttgtacactaacaaattaggatcaaatttaggtccccatgaggcatcatcggttgcagcatatggatgtaccccacttcctaaatcaactgttccgtagaagtcaccatatcctccaccgtattgattttgatactctggtaaggtttttttatcgactacaccaacagtaactccggagctaaaacttacgcctaaacctcctttagatttacttcctttttttagcgttacaaggatcaccccgtttgaagctcttgaaccatacaaagcagaagctgcagctcctttcagtacgttcatcgtttcgatatcgtcaggattgatatccgaagcggcatttccgtaatcgtatcctcctgtgttacctccgcttttctgatcggcactattggtattgtcattattcaacggaataccgtctacaatccataacgcctgattgtttccggttaaggaagtagtaccacgaatcaccacattcgttgaacctccaatattattgttacgtctgatttgcacaccggcaattttacctgaaattgcattggctacgttaccattgtttactttggtcaggtcttctcctttaatttcctgagtggcataacctaaagatttcttttctcttttaagccccaacgccgtaacaacaacctccccaagctgctctgaagcaggagataaagaaacattggcagtgttccccgtaacggttacctctacagccttcatcccaatataattaaagattaaaacagcgttttgacttgtctttatagaatatttaccgtcaaaatcagtttgagctcctgtttttgttcctttgatcaatacactcgcacccggtaaaggtaagcctgcattatctgaaacaattcccgatacaacccgctcctgtgcgagcgcaaattgtgctagcagtacaaaaaaaagtactaccgtttttctttgaaaaaacttgaatttcataaaatggttttataattagtattggcaaatgttttgcttttttgataatttttatgataatatattatcgcaaaaacctattatattacccttttattacatatttaatattttacatgtattatcttaccctttcaaattcgaacaacatacgtgcttattttcttactttttgtctttttttacttgattttagaccaccaaaaaaagggagaaatcctttttacagaaattctccctttttttatgcttttaaaatgattttatttcgctcccggaggacacttttcttctataaattttataaaagtatcgactaaatgttttcgggttccttcgccttcatgaatgctgtgcgtacgatttgggtagatcattaaattaaaaactttgtcgtatttgatcagttcatcaatcaaaacttctgcatttttatagtgcacattatcatcgccggttccgtgaatgtaaagcaaatttccttttaagttctttgcgtgtgttacgggtgaagcctgaatataggcagcttcattctcgtccggcaatcccatataacgttcggtgtaaatattatcgtaaaaatgctgatcggtaactgctgcgatggctacgccggttttatagatctcaggatactgaaacattagattcaaagttacggctccacctccgctccatccgtgtatggccactctgttcgcatcaataaagttccatttcagtacttctttggccgccatagcctgatcacgggtgttgatgattccaatatttttgtaaattgattttctccattttcttcctttcaaaaccggagttcctctattgtccattgcaattccaatgtagcctttaggaattaaaaagtcaataaatccattaaaataaggcatgtcattcgctaccgaagccattggctctccgtaaacgtaaaagaacaccgggtatttttttgtcggatcaaaatcaagaggttttgccatgattccatcgatttcaactccgtcgacagtgcttactttgaatttctctaatgaaaagtcacgtgttggttttaccaaaacatcagcctcttttggcagtatttttttatgatcggaaagtgaaactaagcgtacattaaaatcgcgattgatattagaattggtgtgtttggcatacgatccgtctgtcgaaaactcatattcattagttccttcaaatacttccggagttattcttttggttttaagcgaattaatattcgtctcatacagataacgctgcgtagcatcttttggacttgcgatataataaattgattttgtcttgtcattataagctttaaaataagcatcgaaatttccggttgtgatcagttctttcttttttccgtcacggcttattttgtacacatgcatccagccatcggcatctgaactccataaaaaagatttaccgttgtctacaaactgacaagggaaaccatcgtacacgccagaggaaatatcaaaaacatcaatccattctgctgatttttcctgatacactaaagttgctttcccagactgcgtattgcaattgtaaatcgaagcctgattttgatttcgattcaattgtatagccattacctcatcttttgccacccattccatacgaaccaaataattattatccggttcacccggaatatcaagccagttggtttttaaagaagcgatatcaataactccaatttttacagcagaaggtttttctccagcttttggatattctaccggaattacaaatgggtataaagcgtctgtattgttaatcattaagtgaaactttgtctccgaagcatctacacgccaaaaagctatacttttaccatcaggactccagcgaaatccgtcacgtgcggccagttcttcttcgtaaacccagtcaaaagttccattgattaccttatcagttccatctgtcgttaaagcggtaatctttcctgacgccagattttcaaggtaaatattgtgttttgaaacgtaagctacattttcgttatccgcagaaaatttggcaaacattaaagaagattcttctaagccggctcccaattttcttccttttccggtcgtcaagtcaaaaaaccaatagtcacctctggtattggctctccacactttttttgaattggtataaacgagaactttggttttattctggttccagactaattcttctacttctccgttaaaacctgcatttgttaattgctgtctggttaaaacagtggtattctgattgagtttatccacatcatataccaaaatatcctttccggaatttacccaaaacgaatgtgaattgggcagccactttaattcgttaatatcaatatccttttgagcccaaatgcccgagcagaccaaaagaagcagtaagaagtgttttttaatcatggtttatttcgtatttaatagctgttctatttcttcaatttcaataggcatatcttcggataaattaatgtttccgtcttcggttaacaaataatcattttccagtcggcagccgattccctcttcccgaatataaattccaggctcgcaggtaagcaccattcctttttcaaaaggtttggaatacaaccccacatcatgaacatccagtcctaaaaagtgagccgttccgtgcatgaagtattttttgtatacaggattttcggggtcttgcactgcaatgtcttccaaagtaatcaaacctaattttaccagttcggcttccaccagacctgccatctgtgcttcgtactctttcgataaaacacccggttttaaaaattttgatccttctttcagacaatgcaaaaccgattggtaaacttctttctgacgggctgaaaattttccgtttaccggaagacagcgcgtagtatcggaattgtaattgccataacaaaccccaaaatcgaccaaaagcatatcgccgtcctgacaaaccgaatcattggtattgtaatgtaagacacaggcattcttgcccgaagcgataataggtttgaaggcatgacgatttcctccgtttttaatataatggtacgcaagttcagcctccagttcgtattcttttacattcggctgtaccgcttttaacaatgctttgaatccttcgatacttatagccacggcttttcggattaaagcgatctcttcatctgattttacaggacgcaactctctcgttattttggccacacgctcgtagtgatgtagcggatatttttgcttgcaccactgaatcattcgatcctggcgggtattcatttccgaagttattcttttaatgtgctcgttatgtcccagataaatggcatcggcctcaaaggcaaacagctgcaggactttttcaaattcatgtatccattttacatttttaattccggaaagagctgtaactttttctttggtcaagaaatctccatcccagattaacgtatgttcactgacttcttttacaaataaaatagctctgttttcatctttaaaagcatcgggatagagcaccagaatagtttcgtcctgctcaattccggacagataaaacaaatcattattttgtgcaaaccccatgacatcatctgcattattgggcatcacatcgtttgaagtaagaatagccaaactgttaatctgcattttttcgacaaacctcttacggttattttcgaataaagaagccggaattgaatcgtatctcataatttataattgaaacattttagtatcaaccgaagttgttttgcctgaaataatctcggtaattatttttccggttgccggtgcaaggcttaaacccatcatcgcatgtccggtggcgaaagtcaaatttacaacttttttggcacgcgtaatgattggcattcccgaaggtgtacaaggtctgaaaccaaaccaggtatccttattttcaggcattcccacctgcatatcgggataaaactcgttgatactgtttatgattccctgtaatctgtttttattgattttggtatctccggtatgggtaatctccatagttcccccaaaacgaatatcattgttcataggggttacggctacctttccttcgcatagaatcgaaggaatcgaaggtttgtgatcttggtccttcagtgtaaaactgtatccttttcccggtaaaatagaaactgaaatcccgagttttttagccagtgaaggactccaggaacctgccgccagcacaacttcatctgtggcaaatatacctttgtctgttacgatcttcgtaattttatgatgatcgaaagtaaaatcctgtactgtggtaccggagtgaatttctacttttaagcgctttaattcttctttgataaactgcatgaatttttgtggatacaaatgcgcgtcgcctttatagtgtatccctcctaaaatatcggttttagtaccgttctccagttttgcaactgctgctgcagaaagatagtctacttttaaacccagcttttcggcttctcgtccttcatgaaacatttcatgtgctgttttatcggttttgtacaacatcagaagtcctttttcttcgtagaaaaacgaattattttctctggcaaaatcctgatacaattccttactcaacaatgacaaatcacgcagtgccggcattgcatttgcgacgtgtttctcattggcatgtttgtaaaactgcagtccccatttcatcaaattggcatctaatctcggttttacataaaacggactctgactgtcgaacatccatttgattccctgagcaatcataccgggctgtgccaacggaataatatgcgagggaacgatcattccggcatttccataagaacaaccatcatccataggagactgatcaaaaacagttacctcaaatccttctttagccagataataagcggtacacaagcctattatacctcctccaactatacttactcttttcatttgtacgaaattaaaaaattcattgaagaagaatcttatcctccttcaatgaatctaaatttttaatattttttaaattacctgaaaaccatgagcatacggatcatttgcttcatcgatgatgatggtgttgtaaccgtatacttttgcccagccctgaatgcttggtacaatcgcaggaatgtctccaattgaagtttcctccaccacttttccaataaacttactgccaatataactttcgtgaataaaatcttctcctactttaagtttccctttggcatgcagctgtgcaattctcgctgatgttccggtaccgcaaggagaacgatcgatggctttgtctccgtagaaaacagcatttcgacctgacgatgtcggatctaaaggctctcccgtccaaagcatatggctgacatcacgaatggtatcattctccggatggataaaatagtccggatatttggcattaattctcttacggacttcctgactcaactggataattttaccggcggagaaattctgaattccggagaaattttcttgtggatccacaatcgcataatagtttcccccgtatgccacatcaaaagtaatttcgcccagttcaggacaatcaatagttaatccttctgctgccaaatacgattttacattagtcagacgtacccagtcgactttgtttccggtttgctggtactcgatattcacgaggccggcaggagcttccattcttatttttcccggtacttttggagtaatcaaaccttcttcaatggcaatggtaatggtaccaatggttccgtgaccgcacattggcagacaaccggaagtttcgataaataaaatcccaaaatcattggcaggatcgcttggcggatataaaatacttccgctcatcatatcatgtccgcgaggttcaaacattagtccttttcggatccagtcaaattcttttaaaaaatgctggcgtttttcgctcatgttagcgcccgtcaaattcggcccaccgcctgccaccactcttacaggattcccgcaagtgtgtgcatctacacaaaaaaaagtcttctttaccatttatgttatctgggattttgtttgaatattatttaaagttcttaaaatctgtaatggattctcattttgcaatgctgcaggtaataattcattgggccaattctgataactaaacggtcgaacccagcgataaaccgcatgaattccaacggcagtaaatctcgaatcggaagaagccggataaggccctccgtgaatcattgaaggacaaacttcaactcccgtaggaacaccgttaaaaatcaatcgtcccactttgctctgcatcgctgcaaccaattcgtcctgatttttcaattcctcaggctctccaataatggtacctgttagctgcccgtccaattgattgataatcgttagcaattgttgttcatcatcacattgcaccagtaccgaaacaggtccaaaaacctcatgacttaaggttttattctctaaaaaagttttgccgtctacggttaaaactttctgtactccgtaatttggtgccgcgtcacctttgtattctgcaatttttgcaacacctttctgtgccagcattgttgctgatccttcttcaaaaccattcttcattgaaggatgcaacatacaaaatggttctattttttcaatggcctgagttaattcttctgagaatttatccaactcagctcccttaattccaaacagtaatcccggattggtacaaaactgacctgctccaagcgtgatagatcccgcataagccgtagcccatttttgactgtttacctttacggcatttggcaaaagcaccacaggatttacactccccatctcggcaaaaaccggaattggctctggtcgttgtgctgccagatcaaacaaggctcttccggcacgaatacttccggtaaaaccaactgcttttactaacggatgtttcaccaatgcggttccaagcgttgtacccccaccaataagattggagaaaacaccctccggcatatttgttttttgcgctgcttttataatagccgaagcaaccatttcgcctgttcctacatgcatcgaatgactttttacaatcacaggacagcctgccgctaatgctgaagcggtatctccaccagctgttgaaaatgcaaacggaaaattactggacccaaaaaccaccaccggcccaagaggtaccaacattttacgcaaatcttcttttggcgcaggaaccctgtctgttattgccgtatcaattgcagcctgaacccagctcccttcaatgagcatttgggcaaacgcgcgtagctgaccaaccattcttccgcgctccccctctgctctgcccattggaaagccggattcactgcaatactgaactaacaaatcatttcctaaagctacgatttcgtcagctatagcatttaaaaaaccagctctttctaaaccggaatattttttatacgttccaaatgcctgatgagccaaagcaactgcttcttcaatttcttcatgagttgcttctgtaaaaacccagggattttcgacattctgctgtgggttaaatgttttaaacgttttattacccccagcttttagtgtacttcccacgtaattttttcctgtaatcatatttcttttttgttgtttgaataaatactttacaattcttagcgtctgtttaaaatttattattgagatttattatcaaaggattttcgagcgaaaagaggcaaattttaatagaatagcagcgttattgtagtaaaatttaacgacgttacagccgaaaatcatcataagaaaaccaacaaataaaatttaaagaggctcttaaagaagaaatttgtaaaaccaattgtatcagcctatatactgttacaagtttttataatcaggcaaagttggtcttgatgctaaggatttggcaataatgtctaaaactttttctctttcagctccctgaagcggtaatcttggtgcgcgaacatattctgtcccgatacctgttgctacttctgcaagcttaatattttgtactaaaaatgagttaatatctaattctaataaaggaagaaaccatctgtatatcttcaaggcctcatcaattctaccggctttggctaatttgtatattgcaactgtttctctaggaaaagcacataccagacctgaaacccatccgtcagaccccatcaataaactctctaaagccagggtatctactcctgataaaatctttaatcggtccccgaaacggttaatcattctggttacattcgaaatatctcttgttgattcttttacggcctgaatgttatcaaattttaacagatcttcaaacatatccagtgtaacttcaattttataatctaccggattattgtatatcattattggaagtgatgtattttttgcgacttcagaaaaataagttaccgtttcgaaatcagaagctttgtaacgcattggaggcaacatcattaatccttttgctccatcttgttcggctttattggctgctaaaattgcggcacgtgtagtttgctctgcaatattcataattaccggtacctgattgtttaccaggtttacagtatttttcaccaattctcttctttcctcttccaaaagagtactggcttctcctaatgttccgcccagaattattccatcaacacctgcctctaattgtgcttgtaagttaacttcaaacattctgaagtctaatttatcatctgcagtaaatttggttgttactgccggcataacgcctttccattgaatactcataatatcgattttaattaaaaccaaaattatttatattgaacaaagcaagaggctgaaaaattacctcaaaacaatactatattaccctatataaactgattacacaaaaaaccaattaatatattgctatttttttgacaaaataaaatatatttgaatgaactaaccttgaccaaccatgaaagtttttccatttaaaatccctaaatcgggagaagatcctcttatatatcaagaggatagagagatcgttttttacgacaaactccatcaacacgaagaaatacaaattagttttatcgaaaaaggacagggcgccatttttgcaggagataccatctcgcattaccgcgaaggcgatatcttaatgattggaagcaatttacctcatgttttcagaagtgaagtatatgacaatgaatcttccattatgcgtaccttattctttactacaggctcgtttggaaaagatttcttctccctaaccactttcaaaaacatccagccttttttagaaaacagcaaaaatggatttatcacccacaatccccctaaaaaaatcgtcaaatctttcaaaaaactaaaaaaatcagacaactacgaacgcttcattttgtttctggaaatcataaagtggctttccaacagtgagagagaacagctctccaaccatttgtacgataaaaaaattacggataatgaaggcaaacgaatgcagacggtattcgaacacgtaatgaccaactaccaaaaaaacattaacctggatgagattgcttcgattgctaatatgactaaaaatgcgttctgccgctattttaaagtccggaccaacaagtcctttttccaatttttaatagaagtgagaatcgaacatgcttccaaactgttggccaacaacagtgagctttcggtcctcgaaattgccgaattatgcggctttaacaacatctccaatttcaacagaaagtttaaagaactgaagcagacttctccgttgcaataccgaaaactgaatctataagtagtttagtactgcttaaccgcaaagggcgcaaagtttttttgtctaagtttacacatataacaaggttcgcaaagctttaccctgtagctttgcgaaccttgcgttttactcttaaacttgaataaaaaaatttgcgtgccttgcgtaaaccttagagtgccttgcggttaaaaaaactattcaattgaaagccgtgtcataataggataatgatttgagttctcattgtctgtaaaatataaaccgcaagggacgcaaggattcttttcttattaaattttatataaacgcaaagttcgcaaagctttaccctgtagctttgcgaactttgcgttttacttttaaacttgaataaaaaaatttgcgtgccttgcgtaaaccttagcgtgccttgcggttaaaaaaaactattcaattgaaagcctcgtcataatcggataatgatctgaattttcaaagtcagaaaaactctcaaattgtttgactttcattttactgtccgtaaaaatataatcaatacgtgccggataataacgaaacttataggtggctccaaatccttctccagcttcttcaaaggtgtctttgagttttcctttgatatttcggtacacatacgaaaacggactattattcatatctccacaaataataatcgggtttttgcattgtttgatattttctttaaagatctcggcctgttcctgctgttgtctaaatcctttactgattcgggtataaattaactgcgatttttcctgattgacatgatcgatattatttgaaatatcacttacatccggtgaaatttttatagactgcaggtgcatgttgtacacacgaataacctctttacctcttttaatatcggcataaattacgttattatctgagtttggaaagatgatatttccctgatcaataataggaaattttgaaaagatcgcctgacctgttttaattttatttccctcgatgaaaatgtaacgatgcggatacaccttcaaatccagatgagccgaattggaatactcctgaatacataaaatatccggatctttttcgtcgataaaagcttttatattggaaggaatatcgtcgcggtcgagccatttaaaaacattaaaaagacgcacgttataactcattacagagaaatctctttcgtccttaacataatcttttgccgagaatttataaaatttactgataaaagtaattccggttaacagcaccaaaccggaaagaataagacgttttttaaactgaattccccaatagacaaaaaacaaaccattgagaacgaagaaagccggcataaagagcgttaaaaccgatagaagcgggaaactctttggtgccagaaatggtaaaatataaatactaaacgtcagtacagttagcactatattcaaaaagaacattattttattaaaccatgaaaggttcttcatattgcgggcctaaaacgattattttccagctttaaataaaaactctttttcttcttttgtcagacaatcgtaaccggattggctgattttatctaaaatttcatcaatctgttgttgtgttttgtctttcgtaacaattcttgacgtcactttttcagtaggttttttgtaatttttatgaacttttgtgaatggggtcgatggggattttttaaatagactggcaaagaagtctaatgttttggaaacaattttactaagatctgtaccgttctgaagcagcttgataaaaaggaatccaaagaaagctcctgccaagtgcgagatatgtcctccagtattgtccaaacgaaactgcattaaatcaagaaccagtatcacagctgtaatgtgccaaagctttacattacctataagcagcaaacgcacattcatcaaaggctgataagtggtaacccccatcaggattgccatgattgcagccgaagctcctacgataggcgccgaaatatttaaaaaataaaaactcagtgcaaaaacaatccctgaaaaaatggcacctaaaatatacagcccgagatattgtttctgggtaaagaaagtcagaaataaattacttgcaaaattcaacaccatcatattaaacaacaaatgcagaaagccataatgaaagaaagcatacgtcaaaaatgtccagggcttgaacataaaaacggcaggatctgatgacaacgccagccaattcggaaaggcaaactgagctgtagaaaagttatagaatagcactaatgaaatcaggaaacaaccaatgttccaaaaaataacacgcatggctattccgcctaatcgatattgtaattttaaatcatccagaatgttcataaaagctttctttagtttttatttgcaatattaaagttaaaaattaattccaacgattgttattaaactgattttttttccagtaccacatcatgaagtacccaatgaccgctcctccaatatgagcgaagtgagcgacccctgtacctcctcctccaaatatagaatctcctttgaaacctaaaaacaaatcaatggctaaaattccgggaacaaaatatttcgccttaatcggaactggtataaacatcaaagcaagctcagcatttggaaacataaaagcaaaagctactaaaagtccgtaaatagctccggaagctcctaccattggtacctgagtaattacagacgcattaaataatcctttaaaaccttcttcagtaagattggtctttccaaccccttccaatattggcttaatctgatcaaaaaacaaatcggatctaaaacccgttccgtcactaaaatttacatttaagatctggtgtaatgtcgcatcggatagccctaagcttcttaccggctctaaagctgcctggaattgcaaataatttactccaatttgcaataaagcggcacctaatccacaggagatgtaaaagaaaataaacttctttcctccccaaaaatgttccaaggccgatccaaaagaaaccatcgcaaacatattaaagacaatatgcaaaataccaccgtgcataaacatgtgtgttataggctgccaaagcttaaaaaaatcgctttctggaaaaaataatgcaaaaaactgctcggaaacaggcactaactgagcaccaataaaaaatatgatattaattataagcagttgttttacgacaggagtcatgttgttcatcataaggcaaactttttatctatatcttctacacgcatcgtgatgaaggtaggtttttgaaaaggtgaaatgtttggatctttacaggcaaataatccgttaaccagattgtcctgttctttttcggttaaatacgatccggttttaaccgctaaacttttagccattgatttcgcaatggtatcattctggctgtaactgttggccggaattccgtcttgcaaatcacttaataattgttcaataaccagagaaacttcgctttcggtaatgtttaccggaattcccgaaatcacaatatgatcggtttgagcttcatcaaaaacgaaaccggttgtttctaaagaaggtttcagttcttcgatcagtttcatttcggccgaagaataaaataaattcaacggaaacaataattgctgactagaagcctggttaacggtcatattcaacaaaaactgctcgtacaaaatacgctgatgcgctctttgctgatcgacaatcaccattccggatttaattggcgagactatatattttttatgaatctgataggttccctgactggcttgttcaatttcattatcgttaaataatgaggaggttacttcttcgttttcgaaggtaaacggtgaactttcgatactttctgtatctaaaccggtatacaaactttcccagcttgccgttggctcgactcttttagaataaccggaatacgaatttgctcctgagctataacttgaacctgaacctgaactggaacccgagccggctcctgagctaaaaccagaacccgaactaaaaccggaacctgagcccgattttgtataatgctgattggttttatcatctgtaaatgggttaaaagtcccgtcaacctgaatcgttggcgtttcggcttctaaatctttataatgatatggagtatctaaattggcgtcgcgttcaaaatctaaaaccggtgcgacattaaactgtcccaaactgtgttttatagaggctcttaaaatggcgtacaaagcctgctcatcatcaaacttaatttctgttttcgtaggatgaatattgatatcaattgtattgggcgggactttcaaatatagaaagtaacttggctgcgaaccgtctttcagaagcccgtcataagccgccattaccgcatgatgcaaataaccgcttttaatgaaacgatcgtttacaaaaaagaactgctctcctctgcttttcttcgcaaactcaggcttacaaacaaatccctgaacgttaatgatctctgtatcttcgctaaccggaactaatttttcattggttttaccggacatgatccccacaattcgctgacgataacctgctgcaggcaaattatacaattcgcttccattgtggtaaaaagtaaaatgaatattaggatgcgccatcgccacacgctgaaactcgtccataacatgacgaaactccaccgtatccgattttaagaaattacgacgtgcaggaatattaaaaaataaatttttaaccgcaaaagaagttcctttaggcaaaacagcttcttcctgcgatacaaatttacttccttcgattacaatatgtgtccccagttcttcctgatcctgtttcgtcttcatttccatgtgcgcaatcgccgcaatagaagccaatgcttctccacgaaaccctttagtatgaagcgaaaaaagatcttcggcctggcgtatttttgaagtagcgtgacgtgcgaaacacaaacgtgcatcggttacactcatccccattccattatcgataacctgaactaatgattttccggcatctttaataatcaatttaatgtcagttgctttcgcatcaacagcattttctaacagctcttttacaaccgaagcaggtctttgaaccacctctccggcagcaatttgattcgcaacgtgatcaggaagtaattgaatgatactcgacattaaaaaatttgggttaaaggttgtccatcgatttttatcgaaaataattcgtaaaatctcagggtaatattattatttcaattctggtttttaaaaccaaggtgtacaaatttaatgaatttctgttgtctttttgaacaacagctatcataaaaaaaacaaaaaacctatactattttacacagcataggttttagtattattaaaacaattgtgttttattcgttctcgatttctcttggcttatcttctatctgaagtgctcctgaagacaacaatggctgattgaacgggtgtgacatagaagcctgttggcgaatataagccattttgattgccgcgattgccgcctcagttcctttgtttccgtgaattcctccacttctgtcaatggactgttgcatgttattgtctgttaaaacacaaaaaataaccggaatatcagtctgaacattcaaatcttttataccctgagtaacaccttcacatacaaaatcaaagtgttttgtttctccctgaatcacacatccaattacaattaccgcatcaacgttttgtgtttgcagcattttcttggcaccgtaaacaagctcaaaactccccggaacattccagcggataatttgatgagccggaacttcacaatctgtcagagcgtcaaaagcgccattataaagtccttctgtaaccgtttcattccattcagaaacaacaatcccaaatcgaaaatctttcgcatttgggattgtgtttttatcgtattctgataaatttttattttgagtagccatcttttatatttaagattttagatattagatttcagattgtgaaatacaaatctacaatcttaaatctaaagtctaaaatttttattgtgctaatccgatcaatacatcaacagcagcagcttccggagttgcgtcgtagttgtctttgatatctgttaagtacttcaaagcgtcttctttttgacctaaagccaaagctgttttacctgcttttaacaagaaacgaggagtagtgaaatcatttttattagattcagccgctttcacgtaatagtctaaagcttctttttgttggttcttttgagaataagcgtctccaatagcaccaattgccaaagctcctacaataacttcttttgatttaaattctcctaaatatttaattgcatcatcgtatttaccaatgttcaaagaagcaatacctgcgtaatagttcgctaaatttccagcatcagttcctgaatattcgtcagcgattttaacgaaaccgaatttaccttcagaaccatttaaagccaatttgtacagagaatcacttgctacaccattagtcgctttttcgaagttttgctgagcaacaaacatttcgcttgcagcctcatcctgcttaggattttcaacaaatttctgatatgctaaatatcctatagtagcaattgcaataccagcaactaaaccaataatgattttttgatttttagctacccaatcctcagtttttgaagcagtttcatctaactttgaaaaaacacctgctgtcgtactgtctttctcgtcaataactacctgtgtttcctcatttacttctttaacttctttctctttcggtgctttatatcctcttttattgtaagttgccatttaaaattaatttagtgaacggcaaaaataaaatttttattgaaaccgacgtaaaaaaaatcaattttatcactattttaaaaaaaataatttcatcaacagcaagtccttcctcctcaagcggaaaataattccgcttcaaaccgatcaaaagccttttatatcgataattttcgataatttgcaccctcaaatttttgatgttcaaaacaggatttttcttggctattagttcgtttttttgccacagatttcacagattctcacagattacaaaattatcatgctggatttaacaaaaaaatcatttaatctgcagcaaaagaaaccagtaacgcgagatctaattaacaaacatccgattttacccttagagtttccaaaaaaatgtatttaaacaaaatttctttattcaattataaaaacttctccgaaatcaattttgatttcgaccgcaaaatcaattgttttgtcggcaaaaacggaattggaaagaccaatgtgcttgatgccatttatcatctggcctacggaaaaagttacttcaatccgctggctgttcaaaatatcaaacatggagaagagttttttgtaatcgatgccgaattagaaaaaaacgacagaaccgaacagattgtctgcagtttaaaaaaaggacagaaaaaggttttaaaaagaaacggtaaagcttacgataaattctccgatcatatcggattcatcccgctggttattatttcccctgccgaccgtgatttaatcgtggaaggaagcgaaacacgtcgtaagtttatggacagtgtgatttcacaattggattctacttacttgcaccagcttattcaatatcaaaaagtaattgtacaacgcaatgcactactgaaatattttgcactgaaccatacttttgacaatgatactttatccatatacaacgaacagctgaatacttttggccaatcgatatttgagaaacgaaaagatttcctggaacaatttatacctatatttaatgtacaccatcaggccataaccggatcggaagaaaccgtacagttggtttacgaaagtaatttgttcgaaaaagacttattgaccctgcttaaggagaacatcaacaaagaccgggcattacaatacaccagcgtaggcattcacaaagatgacctctcctttgaaattgattcacatcccattaaaaaattcggatctcaagggcagcaaaaatctttcctgattgctttgaaactggctcaatttgagtttttaaaaaaacaaagcggtgtaaaacctctgctgttgtttgatgatatttttgataaattagatgaaacccgtgtggctaaaattatcgaaatggtcaacagcgaaactttcggacagctttttatctcagacacgcatcctgaacgtaccgaagctattgtaaaatcaacgcatcagagttacaaaatattcaaattagacaattatgccaattagataatgtgccaatgagataatttagatgattagataatgattttgaattatctcattggcacattatctaattgactaattatctaattgactaattatcaatcattattttagcaattctattttttaaaaacacaatcttatgaagttctctaaaattctattcctggtactttcggtcgtattcatttcctgcaatgaaaaaaaatccggtaccattgaagaaattactccgaaggattttgccgaaaaaattaaaaccaccgaaaatgctcaaatactagatgttcgaactccggaagaatttgaatccaatcatattgacaatgcggtaaatattaactggaatggtgatgattttgaagccaaagtggcggcttacgataaatcgaaacctgtttttgtttattgtttaagcggcggaagaagtaaaaaagcagcttcaaaactgaacgaattgggctttaccactatttatgaattagaaggcggcatcatgaaatggaacgcagaaggtttttctaaagcttcaacagctcacgcaggaatgacaatggatgagtttaacaatttgctaaagacagacaaaaaagttctggtagatttttacgcagaatggtgtggtccctgcaaacaaatggaaccgtaccttttgaagatgcaaaaagaaatggcagacaaagtggttatcattcgtattgatgtggacaaaaacgaaactttagcaactcagatgaaaatcgaacagcttcctactatgattttgtacgaaaacaaagccgaaaaatggaaaaacatcggtttcatcaaagaagaagacttaaaaaaacaactgcaataacagagaagatatgttaacgaaagaatcattgcaatttttagacgatttaaagaagaacaacaatcgggattggtttctggaccacaagaaacgatatgaagttttcaaaaaagattatcaccaattagttagtgatttactggatgcaatgaaacctctggatcctgcactggaactattagaagtcaaaaactgtactttcaggatcaatcgtgatattcggttttctaaagacaaatccccatacaaagcacatttaggaatctggatgtcttcagccgtcaaaggcctcaaccgagccggatattatgtacatattgaaaaaggagccagttttatcgccggagggttttattcgcctgaagccgaagatctgaaaaaaatacgcaaagaaattgctttttttcacgaggatctcgaagccatactgaccgataaaaacttcaaaaaggaatttggcagtctggatgtcaacgaaaacaacgctctcaaaaacccgccaagagggtatgaaaaagaccatcctgccattgcgtttttaagactaaaaagctttaccgctacccaaaaatacaacatcgacgaggtgactcaaaaagacttcgtttcgaaaatgagtcaaaaactcatcgctttaaaacctttaaacgaattctttaatcgcgccttagacactgaagaattttagaaaagatacttcgccacgaattcacaaattattcaaactaattcgtgaattcgtggcaaaaagactttgtttcgaaaataagccaaaaactcatcgctttaaaacctttaaacgaattctttaatcgcgccttagacactgaagaattttagaaaagatacttcgccacgaattcacaaattttttaaattaattcgtgaattcgtggcgagaaaacttcaaaaaggatatgctgcgccccagaaatgcgagataaagtttgacgacaaatttcaccgattgctatacatcaaaaaatcctttaaaaatcttttaatctgtggcaaaaaaattaagtttgccgaatgaaaaaaagaaaaatactttttcttggagaatcttatcgtgctgacgccattacgtggatgaaaggccttgaagaatttggcgattttgaaatttgcagctgggaacttcaaacacccaaccattccaaactcagccgattcaaacgtattttagaatatcttttctcccctctttcgattcgaaaaaaaatcaaacaggaaaaaccggacatgattattgccgaaagaaccaccagttatggttttttggcagcaatttcaggaatgcatcctattgcaattgcacaacaaggccgaaccgatctgtggccggaaggttcactcctgctcccctttaaaaaattcattcagaaacacgccttcaaaaaagcagatttaatacacgcctggggacctgttatgaccatttcgatgaaagcaattggtgtagacatgagcaaagttttagtgctcccaaaaggaattgatttatcacttttcacaccatcaatcaataattcgataaaaatcgaagcgattgttacccgttcgctacagccggaataccgtcatgattccattttaaaagcctttggtattttacaccaaaaaggaattgacttttcattaaccattgtaggtaacggaacccgactgcaatctttgaaagacttaaccgcagcattacaaattgaaaacaaggtatttttcaccggaagaattccaaacactgaacttcctaaactattacagcaatccaatacctacatcagcatgcctattaccgaaggggtatcggcatccttatttgaagccatggcctgcaactgttatccaatagtttcagacattcccggaaaccaaagctggatcagacaccgcaaaaacgggcaattgattgaaattgacaatatcgaaatgcttgctgaagaactaatctggtcttttgaaaattcggaattacgaaatcaggctattcttcaaaaccaaaaatttgtcgaggaaaatgcaaattacagcaccaacatgaaaattatttctgaccgctatcatgagttgctgaatcttcataaaaattaaccgaaaagttcgcaaagtcaagatcaacataaagctttacgaactttgcggtttataaaatcacatccataaaaaatctcatgaactttatgaccaaaaaaatctacttcggataagccaaagaaaccttctttttaaaatcatcataaatcacaaagtggaaattgctgttttcctgcatcagaataacatcaccataattttctttttttgaaaagacaactttgcaatgagaaaaatcaatccgcttttctaaatcaatacaatcttttacgatttcttccggattatttccttttgtattattccaaacaaaatcatacaatcgccaattaaaagaatccatcagtttagtatacaaaattttatttttatcatcttccaaaactccattacttgcaattaatcgaactgatcctgaatctttataaatataaaaaatccctaaatccctactcaaatctgattctaaattatgaactttattataactccttgaggaagtttttcgtagaataaagcgaatatgagtatcgtcaattactataaaattaccaaaagcactcaagaaggtatcattcccgcattgaggcaaatttctacttacgaatgttccatccaaattcaatgtcaataaatgccctgaacgattattctcctcttgtttaaccatagaatattctttaatatcagaaattccgataatattatcaattctccaatctccaaacatattactttgagcattagaaacgattgagaaaaatacaactaaaaaaactgcagttttattcttagaaatggactggaacatcaagatacctttttaattcattcaaacttacaaaagaaaatctagaaaataactcgtaacttttctcccctctaaacgacctactcatttcattgaattgtttaatttaatctgataaaaaaatgaacaacagaagaatttggttaaaacaaattggcctgggaactattggactggggctttacccttttgaaacctttgccaacggcactacagagtctatactaccctatacagataattcacccatattactccgttccaacgaaaacccatatggcccgtcaccaaaggcacgggaagcaatggccaaaagtatcaacatcagcaatcgatacggctggaatctttcaccggaactcattacgctgctggcaaaaaaaaatacggtttcagaaaacaacattcttctgggtgccggttccactgaaattttagatttaatacttcaatataccgcattacaaaaaggcaattttataatcgccgaaacgacctttgactactggacagctcctgctgaaaaattaggcataaaaaaaatcaccgttcccttaaccaaagacaaaaaacacgatttagctgccatgctaaaagccattgatgccgacaccaaaatggtttacatctgcaacccaaacaatcccacgggaacgctatgccaaagagaagatctgatttctttcatcaaagaagcaactcaaaaaacacttgtttttgttgatgaagcgtacatcgattttacagacgaacaatcgttaagcgatttagtggtcacccataaaaatctgattattaccaaaactttctctaaaatgtatggtctggcaggcgcccgtattggctatgctctcgcacattctgccatgattgaagaattgagtattttaaaatcgtctcccaacttatccctcagtgttgtctctattgccgcagcgattgcctccttaaacgatgaaagctttattcgtcaggttcgcacctccaatgaagaagtaaaaaaatacaccacaacacaactgaatcttcttcatttaacctgcatcccttcgcattcgaattttatttacttctccttagaaaattacaaaaaagactatttccaacaactaaaagaccacaacatatcaggaacaagaatttacgaagaaaacggcaaatggacccgaattactatcggtaccatgaaagaaatgcaacgatttattcaagccctaaaataagatcagagaaaagatcccagctgttttgtatcctaattaataatggttattttttagaaatccaattcaaataaattataatccttacttttggagtcagaattaattcttcaaaaaagccttttatttatggaaatccaatccaatttttctttaaaaaactacaatacttttggcatcgaagccaaagccagacaatttgttgccgtacatacggttgctgaactgaaaactattttagaagaaaacaaagacgaacaaaaatttattttaggcggaggaagcaatatgcttttaaccaaagacatcgacgctttggtcgttcatattgatttaaaaggaaaagcgatcctcaaagaagacgatgattttgtctgggttgaaagtcaggccggagaaacctggcacgactttgttctttggacgatcgacaataatttcggaggtttagaaaacatgtcacttattcccggaaatgtgggaaccacaccggttcagaatatcggtgcttacggaacagagatcaaggacacttttgcttcgtgcgaagcgatcaatattgccactcaggaaatgaaaacattcactaatgccgactgtaaatttggctacagagaaagtgtcttcaaaaacgaggtaaaagaccaatacatcattacctcagtcatttataaactaacgaaacgaaatcataaaatcaacatctcatacggagatattaccgctgaactggctaaaaataacatcactgttccaaccttaaaagacgtgagcaatgctgtaattgccattagacaaagtaaattacccgatccgaaagaattaggaaacagcggaagcttctttaaaaatccgattttactaaaatccgattttgaaaaaatacaccagaagtttcctgaaatgaaatattacgaagtttcagaaaccgaagtaaaagttccggccggctggctgattgaacaagtcggttttaaaggaaaacgtttcggtgatgccggaattcacaaaaatcaggccttggttttagtcaattatggcaatgccacaggacaggaaatcctggccgtttccaaagatgttcaaaaaactgtttttgatacttttggaattcagattgaagcagaagtaaatgtaatttagatctttagacaacttagattgttagattattggatcattagattatcggatcgttggatttttaaccaattgaaaaattaataaactgcaaccctctcaacctttgtttctttgaatctttgaacctttgttcctttgagtcttagaaccttagtatcttagcacctttacttagattgctggattaattggattattgaacttttaacggattgaaaaattagatctttagatggttggatggttagacttcttagaatctcagtatctttggcgaacctctgaacctttgcttctttgtccctttgtccctttgtccctttgaacctttgtccctttgaacctaaaaaaagaaaaaatgtacacacctgacttatacaaaaacgaagatccggaatcgatccgagcttttctaagagaaaacagttttggcatcctgatcaatcagacacacggaaaattatgcgcgacacatattccgatagaacttgaagtaaattcagacggaaaagaaattttacaaggccatctttccaaactcaatccgcaagcagaaggttttgccgaaaatgatcaggtattggctgtttttacaggtccgcacagttacatttcatcgtcctggtacgatcatgaaaatgttcccacatggaattatatagcggtacatgtttatggccgaatcaaaattgtcgacgaagccacttccatagaacagctaaaaaaattagtcgacaaatacgaagcgaattcagtgaatccggttcgtgttgaaaatttatctgccaaaaccatgcgggaagccagaggtatttttggcttcgaaattgaaattgacgaaattcaggctactaaaaaactctcccaaaacagggacgatcacaattataaaaacataatttcggagttagaaaaaaccgaaaaccctcaggctattgctgttgcaaaagaaatggcaaaatgccgaaagtaaatccgttttcggcattgaaaattaggatttcatgagtacatttgcactcgcaagattcagaaattaaaagacattaaaatcagatgcttataactttattttacttctttattgctattgttttcattcagattttctattacttagggatttttggaaagttcgctttcggcaaacctcaggaaataactccaaagaaaattccggtatctgttatcgtctgtgcaaaaaatgaagaagaaaatgtaaaaaagttcatccctcttcttgtggagcaaaactaccctgattttgaaattgttttaattgatgatgcctcaagtgatgaaactctggaggtttttgaagaattcgaacaacaatacagcaatatccgtttggtaaaagtgcaaaacaatgaggctttctggggaaacaaaaagtatgcattaactttaggaatcaaagcttcaaaaaaagactacttactttttaccgacgctgattgttatccaacctcgacagaatggatcactgcaatgacttcaagattcaccatgaacaaaacaattgttttaggctatggcggttatgaaaaagtggaacgttctttattgaacaaaatcatacgttatgaaaccgttttaacggctgttcaatatttttcatgggctaaactgggaattccttacatgggtgtcggtcgaaacttagcctataaaaaggaggaattttttaatgtaaacggctttatcgagcacatccagattcgttcaggtgatgatgatttgtttatcaatcaggctgcaactaaaagcaacacgaccattgcttacactcctgaaagtttcacttactctaaaccaaaggaaacttacagagaatggtttactcaaaaaagaagacatgtttctaccgcagaacattacaagtttttcgataaaatgcaattggggctgttttttacctcacaattatttttctttttatcagcaattgtattgctagcatttcagtttcaatggatcgctgtattggctattttagcaacacgttacactgtagcatggatcgttataggattttctgccggcaaattaaaagaaaatgacctgaaagtttggtttcctgttgttgaaatcattcttatattcacgcaaattaatatctttataactaatatcttttcaaaaccggtatattggaaataaattctaaaatagaaaaagctaaaaaaggcgatcagatcgcctttacttttttattagattatttctggaatgaagtgtacagctttatgctgaagcgtaccgaaaatgaaaccatcgccgaagatattaccatcgaaaccttctctaaagctttcgacaaaatagccagttacaattctgaatttcaattcaacacctggctaattgctattgcaaaaaacgtttatattgatttgttacgtaaaaagaaaaccagtctttttatagaaatcacagacaacgaagaccaacaggcctacaatattgccgaccctactccttctgccgaagatgctttaattaaagaacaaaatctttcgcgcctgcttcaatgcatcaaagaattaaaacctcactaccaggaagtcattcagcttcgttatttccaggaaatgacttatcaggaaatagcgctgaaaatcaacgaacctttgagcaatgtcaaagtaaaactactccgtgctaaaaaattattagcagaaatcatcgaacgcaatagataattcattatctttaggtaaagaataaaatatccacgtattttttcttaaaacacctatttattcacatactaaaacaacaacatctccgttgttagctaaaaccaaaaccgtactgcctatgatttaacgttacctaaccttaaaatccaaaaatcatgactaaatcaaacatctacgaaaccaattggaccgatcttgttttcgaaaacaagaacaaagagtacggcgcttatcaattacgccaggagagttcaaaaaacacagttacagcgctatttgcgggattgctattattggccggtttgggaagcgcgtcggtgttgattaataagtttggggcacatggtcctgtagaaacagaaccgactgttttttcggttccaataagacctacagacataccaattccggtacaaccacaatcacctgctccacctgtagcgcctcagcaaacggcagctgcgtcacccgttaccagtacacaattggtaaatccggttgtaacagccgcaactcaggcaacacccgatgttattgcaacaaatgcagacaatcatcctgttgttgaccatgcaaataccggaacaggaaatgccgtaaatgcattacccgcaagtggcggtggcgtagaaactacagctttaaccggagaaagtaaagatcctgttaatgtagccatcttagacaaactaccagaatttccgggaggaatggctaagttttatacttatgttggaaacaatttcaacagaccggaactggatgcggaaagaaccttaagagtgtatgtatcgtttgtaattgagaaagacggttccattacagacattatggtaaaaaacgatccgggatacggaatcggaaaagaggctatcagggtattgaaatccttaaaaacaaaatggagcccgggtattttaaacggaaatcccgttcgaactgcctataaccttcccatcacaataaaaacagaataacaataaaaaacgaaaaagcagaatttaggttctgctttttttatttcattaagtattatgcccatcttaattaaatcccgaagcagtaaaaaaaattaacaaaataaattacttttacagctccataagaggaaaatcaaatctattaaaattaaaaactaaaaaatgggaatattttcagctattctaggcaacgccggctctgttagtcaggaagagttattaaaaaaatacggacagcttttgacggacagagaagaaatcgaaatgggttttaaactacttcgcgatacttttatcttcacgaacaaaagattaatcctggttgatgtacaaggattaacaggaagcaaaacagaatacaaatctattgcttacaaaagtattacacgtttcagtgtagaaacagcaggaacttttgatttggatgccgaactaaaaatctgggtggcaagcgaattacaaccaagcattgtaaaacaatttaacaaatcggtaaatgtatacgatgtacaaaaagtactggcatttcacgttttaggttaagcattatacaaccaaacccgacaggttttaaaaacctgtcggatttgataatagataaaataaaattattttttctttttagcaggagcttttttggcaggagttccttttttagccggagcagtatttacaattttctgctgtacatacggtttatacaaaccatctttctctgctcttttcttagcatcttcagctctttgtttggaatccggatgtgaactcatcatctgatcgataaaggaagcttcattaccttcactcatcttcgccaaaattctaaatgccgattcttcagcatttacattgtaaccgtttttctttaaaaattcatacgaaaacaaatcagcttctgcttcttgcttacggctaaacttactatcaataatggcactacctattttacccaactgactatcggtaacacttgcaatcgtagctgattgagaagcagccccttccaacaaagcttcttttctataagctgcttttatcgcgtctctggaatcctgattggctacgtgaccaatttcgtgaccaattactgccagtaattcattgtcatccataatatccatcaatcctgaatatacacgcacgcttccatcagcagttgcgaaagcattaacttcttttactttataaactttataattcaaagtgtaaccgtcacccgcagtatactttccaaaaactctgttcagtcttaaagtatacggatctgtcgcagcagcaacctgatgttcagcatccattttatcaacagcagcttttgataaagcagcagcatcagcattactaaaagtaaaaccgctaactcctttttgaacagcacccaatgctttttcaccaaaattaatctgcgcatttatttttgtaaaaccaaaagcggcaaacaaaactcccaatactataaatttctttttcatgttctatgtgattacaatttaacaacaaatgtagtacaaacccaattccgtttgaattgcatttcgactaattttttaacaaataaagatataaattttaaatgagtaaaaatgagcagtcaaacaaaatcatcactccaactcgaattggccaataaaaaagaggcattttaccccgcatcaatgctttaagaataaaattttaacacacttacaccattattaccaaaagtgcattataaaaactccaagtctttcaataccaaattaaatcttaaacgaatctccaaataaactacattgcttatctttgtactttgaattttgatatatggaaacagtcattgaaaatataccaacaggaaaacctaaatggttaaaggttaaacttcctattggacaaaaatacactgaacttcgtggtttggttgataagtatagtctaaacactatttgtacttcgggaagctgcccaaatatgggagaatgctggggtgaaggtaccgctacttttatgatattggggaatgtatgtacccgttcctgcggtttctgcggtgtaaaaaccggacgtcctgaaacggtagattgggatgaaccggaaaaagtagcccgttctataaaaattatgaacattaaacatgccgtaattacaagcgtagacagggatgatttaaaagacggcggctcaattatctggattgaaacggtaaaagcaatccgaagaatgaatccgaatacgactcttgaaaccctgattcctgattttcagggaatcgaaagaaatatagatcgtattgtcgaggccaatcctgaagtggtttcacacaatgtcgagactgttcgtcgtttgactcgtgaagtgcgcattcaggcaaaatacgatcgtagtctggaagttttacgttatctgaaagaaaaaggaatcaacagaaccaaatccggaattatgctggggcttggagaaactgaagaagaggtttttcaaacgatgactgatttacgaaatgcaaatgttgatgtagttactattgggcaataccttcaaccaagtaaaaaacatttgcctgtaaaagaatttataacgcctgatcaatttgcccgatatgaaaaatttggtcttgaattaggtttccgtcacgtagaaagcggaccactggttcgttcttcttacaaagcacaaaaacacattttataaaaagatttaactgtttaaccgttttatttgtttaatcgggtaagtcgtttaaccactaaatgtttattggtagatgcgattaaacaactaaacgaataaacgatttaacgatttaacaaacaatcgaaaagcttgaaaacaagaatcgctataaacggttttggaagaataggccgaaatttatttcgcttacttttaaaccatcctgaaattgaagtaattgccattaacgacattgctgacaacaaaaccatgtcgcatttgataaaatacgacagcattcacggagtcttaccttttaaagtcagtcatgacgaagaaggaattattgttgatggaaaacattttttcttttttcatgaaaaaagtatctctaatctggattggaaaagccacaatatagatttggtaattgaatcaacaggaaagtttaaaacacacgaagaactaaacgcccatattgaagccggagcaaaaaaggtaatcctttcggctccatcagaagttgacaccatcaaaacagtagtattaggagttaacgaagccattcttgacggaagcgaaaacattgtttcgaatgcaagctgtacgacaaacaatgcggctccaatgataaaaatcatcgatgaactgtgtggaattgagcaggcttatatcacaactatacactcttacaccacagaccaaagccttcatgaccaaccacataaggacttacgtcgtgcaagaggggcaagccagtcgattgttccaacaactacaggtgcagctaaggcattaacaaaaattttccctaacttgcatcataaaatcggaggatgtggaattcgcgttcctgttcccgatggttccttaacagacatcacgtttaacgtaaaacgtgctgttacgattgaagaaataaataaagcatttgaagaagcctcaaaaacaaatttaaaaggaatactggattacacggaagatccaattgtttctgttgatgtaattggcaacacacattcgtgtttgtttgatgctcaattaacttcggttattgacaaaatggtaaaggttgtgggttggtacgataacgaaattggatactcatcaagattgatcgatttaattttactaataagaaaaacctaagattcattgtaaaagcattgccatacatgaaacattatctttttattgttgtttgtctattaaattcgtttttgtactctcaatctaaaaagagtacggatagcatttcctattacaacaaactaacggacaccaatctcagcaataaaaaatacgaaaaggcaatttattacaccgaaaaatcaattgatttttgcgaggcgaacaataaattagagaacctggccaatcagacttttaagcttgggaaaatttattaccatcaaaaaaattacgcagaagctctaaaaaactttcataaaagcgttgctttgtttgaaaacacaaagccaacctgcacaaaagttttggcattgcactatattggtctaaccaataccacaaaaagcaattacgaaactgcggcaatctactaccgaaaagccgaagagcttttaaaccagttaaagattaaggatcatgctgaaatactaagctatcaaaaagcaatagctctaaaaaccgctaaaaacctgcctttagcagctgaaacttttcacaaaataacacaacggccggacaatactgaaatcctaaaaaccaaagccgattcgtattatcaactaggcttactcgaaacacaactgaaacgaaatgattcggctatagtctattttgaaaatgctttaaattataatgccaaaacaaataatctggcccaaaaatcaaaaatcgttctggcaatcagtcaatattacaggcaaaacaaaaaattcgatcttgcttactcgtacctggaagaacattatcagttagagaattacgtcttaaagctaaaaaacactcaaacggatcacgatgaattcgaaaaattcaagaagaacgagtccttaaaagccagtattaaaaaggaaagcgaagaaaaaattcagctaaaaacctaccggtattccaaactggtaagtattctggccattgcccttatctcgatcttatctcttttgagtttagcattgtacaaaaacaacattattagaaatcagaataatttactgttaagagagaaaaacaaagaactcattctggccaaaaataaagctgaaaaggcctctaaagcccgatctgagtttttatcgactgtaagtcatgagctgcgaactcctttaaatgccattaacggaatcactcatttattactggaagataaccctaagaaaaaacaactcaaatatttagaatctttgaagttctcgggaaattacctgactacttttatcaatgagattctggaaatcaataaaattgattcgacaaaggtcgaaatagaaaacataagctttaacctgaaagagcttctttttaacattcagagctctttaaaggaactggctaccgccaacaaaaactactttaaccttgaaatagacgaggctattccggataatataattggagaccctacaaaactgtcccaaatcatcctgaatttaatcaacaatgctttaaaatttactcaaaacggacatgtcaatgtaattgcaaaattatatgaattggaagaagacaacacaaccatttactttgagattgtagacactggaattggcatcccggaagataagcttcagactgtttttgaaagtttttcacaaggatcaatagaagtaaacagaaaatatggcggaaccggccttggacttacgattgtcaaaaaactaattgagcttttgggtggagagatcaaactaaaaagtgaagttggcaagggttcaacttttacattcaaactaaattttaagatcaataaagaacaattgaaaacgattgaagaaataaaaccatacaacgacgtacaattaaacaacaaatcaattctgttgatcgaggacaacaaaatcaatcaaatgattactcgaaaaatgcttgaaaataaaaacatcagctgcgaaatcatcgacaacggtgaagatgcggttgagcttttaaaagtaaaacgttttgacatgattctcatggatgttcatttaccgggaatcaacggaacaacggctacaaaacttatcagagagtttgacaaaaccactccgattattgcccttacagctatttcactagacgaaaacagagacatgctgctgtcttacggaatgaacgatgtgattacaaaaccatttgttccggacgaattctacagtattatagcccgttttttttagaaagatactaaggagctaaggctctaagtcactacgttttttttgtacatactccagaatcgcagtgtcaaaattttgactgttattgataaacgtactttttattggcaaataatacaattgtgaaatcaatttggaatctttcagccgaacatagtctttttctgttgtaatgatttttctatgattggctttttccagaatattggtcacatctgcatcagaaaaatgatgatgatcggaaaaagtcaaacagtcatctttttcatttttcaagtaatcaaaaaacggtgcaggttttgcgattccggctaaaagcaattttgattctgattgaatatcttttacagcaagttgctcttcttcactataaataaaatcatcatagttaataaacgtaaaatacagccgctgggagctccttaactttaatttcgacctaatttcttcctgctttccttcagacagttcttttggacattttgttataattacaatattggcacgatcagccccacttcgactctcgcgcagatttccggttggcagcataaaatcatctgtatacaaatcatcataggagcttaacagaatataaaacccggctttcacttttcggtgctgataggcatcgtccaacaaaatcacttcgggtttttctttttgcgaaagcaattgtgtaattccgtttcttctgttcgcatcaacagccacctgaatattgggaaacttttgataaaactgaaacggttcatcgcctaagatttcggcattagaattatcactagctaatacataaccttctgattttcttttgtagcccctgcttaaagtggcaactttatatttctgagataacaatcggataagatattctatttgtggtgttttacctgtcccgccaacactaagatttccaaccgcaataaccggaatatcaaatgaagtcgattttaaaattcctttgtcgaaaagaaaatttctcactgcagtgacacatccgtataaaatcgcaaacgggaaaagtatttttctaagtacattcattttacgaaagtataatatttttcgttaatttgttttatgaatttgattcaggttccacgtttcagattttccagcaacaggaaacttgaaaccaataaaacctgaaacttcaaacaaaaagtagaaatgaaaatcaaagaaatattagctgttctggaagaaatggctcctttggcttatgccgaagattttgacaatgtcggactcttagtgggtgataccgaaacgaaaagtaccggagttttggtttgccatgatgctttagaaactgtaatcgaagaagcaatagccaaaaactgtaatctggtagtttgctttcatcctattttattttcgggaattaaaaaaataaccggtaaaaactatgtggagcgtgccattttaaaggcaatcaaaaacgacatcgctatttatgccgttcatactgcattagacaaccattctcagggagttaataaaatattttgtgatgctttaggcctgatcaacactaaagtcttaatccctaaacaaagtttcattcaaaagttgattacctataccacccctgataattcagaaaaagttcgcaatgctatgtttcaggccggcgctggtacgattggaaattatgacaactgtagttttaataccgaaggcttttttacttttcagggaaatgaaaacagcaatcctgtaattggtgaaagaggaaaactacatacaggaactgaaataaaaatcgaagttgtatttgaaaaacacttacagtctaaaattttaaaagctttattttccagccatatttacgaggaagtagcttatgaaatttatgatctgaaaaatgcccatcaaaatattggattgggaatgattggtgaatttgaaactgaaatggatgaaaaagactttttatattccgtaaaagacaaaatgattgcagacggaattcgtcattctgcttttttaggaaaaaaaataaagaaagtcgctgttttaggcggctcaggaagttttgctataaaaaatgctattcaggcaggggcagatgcttttttaactgccgatttaaaataccatcaattttacgaagcagaaaaccgacttcttttagccgatattggtcattttgagagcgaacggtatacaaaaaactatattgttgattatcttcgaaaaaaaatccttaattttgccatcattttatcagaagaaaatacaaatccagttaagtacttataagaatatggcgaatacgaaagaattaagtgttgaggacaagttaagagcaatatacgatttacagcttattgactcccgaattgacgaaatcagaaacgtaagaggagaacttcctttagaagtagaagatttagaagatgaagttgctggtttaagcacacgttcagagaaactgaaaggagaacttgaagtgattgaagagcaaatcaaagggaagaaaattgccattgatgagcacaaagaggtgatcaaaaaatacacgaaacaacaagaatcagttcgtaataacagagaatttaattctttgactaaagaggttgaatttcaggaattagaaattcaattggctgaaaagcaaatcaaagaaatgaaagcttctatcgaacataaaaaagaagttatttctaatttaaaagaaaaacttgacgcaaaaagttcgcatttaaaacataaaaaatctgaactggatgcgattatggctgaaactcaaaaagaagaaatcttcttaacggagaaatcagcagagtttgcttcacaaatcgaagagcgtttattagcggcttacaacagaatcagaagcagtgttcgtaatggtttagcggtagtatctatcgaaagaggagcttcagcgggatcgttctttacaattcctccacaaactcaggtggaaattgcttcaagaaaaaaaatcatcactgatgagcactctggaagaattctggttgacagcgcattagctgaagaagaaaaagaaaaaatggaacaattgttctctaaaatctaaataactgtcccgatctgatcgggactttttttttgcgtctaagcactatttctttgccacgaactacactaattttgccaatttctattttgatacagtaaagaataaaaattcgcgctaaatttgtgtaattcgtggcgaaacttttttaggtcgattcccgaatattatttttatcactaaattatttgttttgggaattaaaaaaggaatccgttttatcactttaaaatcggttgggtcttatattaactttttgagctatgttcgtccgcaaaaagcgatggagctttcttatgccctttttagccaacccagaattggaagactaaagaaagaagcactgcccaaagtattaagaaatacagaaacagagacgtttcaccataacgaacatcattttcaaacgtatgtctggaaaggtaacgaaaccaaaatattgcttgttcacggttgggaaagtaatgcttcgcgttggaaaaaaaccttaccgcaccttcaaaaatcaggcagtaccattattgcaattgatgctccggcacacggacaaagcagcggtaaagaatttaacgttcctctgtatgctgaatttatcaataaagcggtcgaaaaataccagcctgccattattattggtcattccatcggtggcgcagcatgtgtctatcatcagtatttgtttccccacaccagcatcaacaaaatggtcattctgggagctccctctgatctaaaaacactgattgacaattatatctcaatgttaagcctgaacaccaaaatgttttcacttttggaaagtaaattcatgaatcgtttcaattttaaactggaagatttttcaggacagcgttttgcctcagaatttaatgtttcggggttaattgcccacgacacttcagacaagattgttgcttttgaggagggcaaaaaaatcgccagtcattggaaaaacagtcagtttattgaaactaaaggcttgggtcacggaatgcatgacgatgaattgtatcaaaaggttattgagtttttgtttgcttctaaataaaggtgctaaggttctaagatgctaagatcctaaggttaaaaaatccaacaatctaacaatccaatcatccaagaatctaaagatctaagaagtctaaccatctaataatctaaaaaaaatgatcgctgtaatttttgaagtaattccaaacgaaggaaaaaaagaagagtatctgtctattgccgcaagtttacgaccggaattagacaagatagaaggttttatatcaatcgaacgctttcagagtttcagtgaccctgagaaagttttgtcattgtccttttggaaagacgaagaaagcgttcaacaatggagaaatttagaaatgcatcgccatgcacaagccaggggacgtaaagaaatttttaaagattatcacttacgaattgccgccgtagttcgagattacggaatgtttgaccgcgaagaaacccctacagacagttccgattttcataagaagtaaaggttctgaggtactgaggtactgaggttctaaggttctaaggttctgagatgctaagtttctaaggttaaaatctaacaatctaacaatctaaaaatctaataatctaaatatctaattatctaaatatctaataatctaacaatctaaagatctaataatctaataatctaaatatctaacaatctaaatatctaataatctaagaagtctaaccatccaaccatctaataatctaagaagtctaacgacccaagaagtccaaattttgactacttttgcactatggaagagaatttaaaacgtctgaataaatttataggagaaacaggatactgttctcgtcgtgaagccgataaacttattgaagaaggacgcgtaacaataaatggtgctgtaccggaaatgggaacaaaggtttcgcaggatgatgaagtacgtatcgatggaaagctgattgtcgagaaaaacgaaaaaatggtttatttagcgttcaacaaacctgttggaattgaatgtacaaccaatcttgaggttcgaaataatattgtagattatatcaattatcctaaacgtattttcccgattggacgtttggacaaagcgagtgaaggattgatttttatgactaatgatggtgatattgtcaacaaaattctacgcgcacgaaacaatcacgaaaaagaatataccgttacggttaacaaacctattaccgatcgttttatacagcgaatgggaaatggtgttccaattttggacacggttacccgaaaatgcaaagtagaacaaattagtaaatacaccttcaaaattattctgacccaaggtctgaaccgtcagattcgtagaatgtgtgaatatttaggatacgatgtaactgctttaaaacgtatccgcatcatcaacatctcattggatgttccggtgggtcgttatcgtgatttaaccgatgctgaaattaaagaactgaatcatttgatcgcaccgtccagtaaaacagaggaagccagtctcccaaaagaggaagctccaaaacgtagaaccgaatttatttcgaaacacgatccccgatttaaaaaaagaggagactattaaaatattcgcataaaaaaatccctttcgataaaacgaaagggattttctttaatatgagaaattgtattttttatcagaaccatcttcttcttttgaataaaaacactccaactgatgataagacaacagacactaagagaagaatccaaataccatatttactttcttccagaccattcggcacattcattccatacaaactcgctattaaagtaggaatcatcagaataatagaaatcgaagtcatttgcttcataatgttattcatgttattagaaattaccgaagcataagcatccatcatccccgtcaagatattgctgtaaatatttgccgtgtcctgtgcctgacttaattcgatatcaacatcttccagtaaatccgggtcaaaatgctctctttgggcttttagatttttgattctgtgaaataaaacatcattcccttttaaggaagtaataaaaaacaccagacatttttcgatctgtaaaagcgcctgtaattctgcgttcttgatcgatttctccaggttgtcttcagccagttttatcttttgattgatctgctttaagtattttagataccagacacttgacgatagaagtaacctcatcactaaatcgaaattgtctttgatcactatatttttccgtcttgtatattgaagaaaatcagaaactatctcggtttcataaaaactaatcgtaacgcaaacatcatctttaaaaatcaaacccaaaggtatggtttgaaaaggaagcttaacatcgttactctttataggaaccctcatgataaacaaagtccagccgtcttcagactccatacggggtctttcgtcgatatcctcaatatcgttataaaaggcttcaggaatctgaagttcttccagtaagtattttttttctgtttctgaaggagattcaatgctgatccagcagtttggagtccattcttgtatctcgattagtccgttgttgtttttgtaaaaggctttcatttcaaaattgcaggtgtttagcgtagcattttgaaaaaattcaaaagctactttaattaaatactaacgaataataatcgtccattggagaagttttttttagtgttgcaaaagtattctttatttttaaaacgaaaaactttaaactactaattaattattaaaaaaccgccctatataaattctacagggcggtttttacaagtatttactactttttttctacaaattcgtaataaagtgcttttgaaagaaaaggatcatccttgtgatcttctatacgattctcttccagataaccttgtccttcgccaacaatatttattgttgaaaagtaagcatcgcggctctcatcgttaaagtgcaagtttcttaaaaaccagggatcaactcctttatttactgagacattatagtttgtgattagatttccccaatttacaaaactgcataaaagtatcgttccgtaaaaacaccagaccatttggttaaaaaggtaagcgtttgttttttgtctggtgatttttaaaaaggtaaaaatcaaaccaattaccgctaaaatcagaaaagcataaactcccagtcttttataagttaagccaaagaatgacacatattctgaatttttaataatggtactcactattaatacgccatttaaaacaatccatactttagccagttttttaagatgagctgcttttttatcaaaattaaatcctcctttaaaataaaacagtatcactccaaccgccataattattgaaaagattacggcattcactctttcgtgagtagctgagctaagtttagaggtctcgacagcctcaaaaaattgctcataattgtaggtgatgataaaaaccaagagcataaaatttaataagactaatgtaatctcgccgctttttctttcaaagtccaaatctaaaaacgaaaatgtattctgatttttgatttcgacaacattactaaactcattgtctaaaagtttatttttctcgtaacacagttcgggaacccaataattccagaaactaaatgaaatataaaaccctaaaacccctattagaactacttcgaaaatatcaagatctaaagtataatccgttaatagagaggagaaatgctcacttccgaacgaataggccgtaaaaaacacgattaaaaagaccaacggaatcaccacataagcaataagctttttcgcaaaattattatcgatttttctttccggaagccattgactgaacacaaaaacacgtcctgctgaagcaaatgcatttaagaatacaagaggaaaaacctgaagtatctttagctccggatcctgtattctaaaatgcaagaacaaaacagacatggaaagtgctaaaaatgaagcaaaatccccgtaccaggcaaaggccagacacgacagtacggatgtaaccaccaaaaccaaatgagatcggtcagtaaacttatcctgaaaaaaacaacaaatcaggccgattaacaatagtccaaaaatggcgaggttcactcccattgattcatggtaaaaaagcaggataaagatcaaactgcaggctgggataactaggtgttttttcattgttgttgaatttatgtattagaagtcatgtagattatcgccccttttattggttttctttgcaatatttttgtgacgattttgttattttaaatttaaaagtactttgtatttcaaagttattaggtaaaaaaatagagctattacgatttcattaatttttcgagaaaagaaaggtgttctttgaaagccgcacgccctctgggagttacctggtaagatgttttaggtttcttgcctacaaactctttttttacttcgatatattccgctttttcaagagctgacgaatgacttgccagatttccgtccgtaatattcagcagatttttcatttcagtaaaatctacccattcgttgaccatcaaaatggacataatacccaatctgacacggctttcaaaatctttatttagtttatcaataattcccatcgaatggattatttatattttttgaacattattaatccgtacaagatatgcaaaataccaaatccaatgatccaaaaaatcaaaccgtacccaataaaaaaaagagaaataaatcctaaaaccaactcgcaaaatcccaagtacttaatatcagaaaaagtatacttttcagcatttattaaagccagtccgtaaaaaattaaagtagccggtgcaattaaaccataaacctcatgaaagatcagcgccagacaaaatatacctccggccaataatggaactgtcaggttcaaaagcatatttttggtagccgaagtccaaataggtaaattatgttttctgctttttctaacggtaaaaaacaaaccgaagctaaaagcaaaagctaaaataatcaaacctgtaaagaccagttctgaaaccaggttagcagaatattgcttctcataatctccaccaaaatattcggtcccgtttgctttaaacaattggtaaacatacaatccaccaattaaagccgaaagtcccgcaaatactcctgaaaggccgcttaatgatataaatcttgaagaacgctccatcatggaacgaatatgggctaaatcttcttggtgcttctgattcataaataaagtactttgagatacaaagttaaatattaatttgaattgacaagctaatttttggaaaaatttcgcagagatgcgcagagttgacacagagatacgcgaagatttctatattgctctgtgtagctttgtgtaaactctgtgtgtctctgcggaacaaaaaaaatcccacgaagactcacaaagctggcacagagatgcacggagtcttttatgcattcttttctaaaaaaaaatccaaatcccaactttataaaacatggatagtccctataggacattttttcttattttttctaccgaaatgtgacttctaacggagtttatattgtagcgaataaataaacgctaacaacaacagataacttaccttttttctgcagatatgtgactcctagcggagtctatatcgtagacaataggcaattacaacataatagccattacagcatttttctacactaacattaaactcttgaaagagcttatccatagggatcaaataaaggtaacacaacaactaacctgattcgtcttgtcccgtagggactacaccttcagattccaacattaacttcaccccatccaaaaaaaagcccgttctctcgaacaggctttaatctaaaatttatttctacactattaatttttagcgcttcgcatctttcttgctaaaagtgtatttttcaacaacattgcaatggtcattggtcctactccaccaggaaccggtgtaataaatgatgattttttacttactccgtcgaaatcaacgtcacctgtaattacataaccttttggatgtgaagcatcttctactcttgtaattccaacatcaattactactaccccatctttcaccatgtcggcttttaagtaatttggcactcctaatgccgtgataataatatcagcacttctggtatactcctcaatgttttgggttctgctgtgcgttagcgtaactgtagaatctcccggatttcctttacggctcattaaaagactcattggtcggcccacgatatgacttctgccaataacaacagtatgttttcctgcagtttcaatattgtaacgctctaacaactgcatgattccaaatggtgttgcaggaataaagctgtccatctctaaagccatttttccaaaattcgcaggatgaaagccgtcaacatctttgtccggatcgatagccatcagaattttttgttcgctaatgtgttttggtaaaggcaattgtacaataaatccgtccagattatcgtcttcattcagttctttaatttttgccagtagttctgtttctgtaattgtttcgggtaaactcaccaaagtcgaatcaaagcctatttgctggcaagatctcactttacttcctacgtaagttaaacttgctccatccgttcccacgattactgctgccaaatgaggtactttccctccggcatcttttatcgattgaacttcggctgcaatttcgtttttaatgtcttcagctgtttttttaccgtctagtagttgcattgttttattttagtttctgatttaaaatttccggtttcacgttaaaagcgaaacacctatttatattaatcaaaaaagtttcaagttgtagtttcataacctgaaaccttaaacttgaaacttttttattttatctcggcattccgcctggcattcctttcattccgcccatcatcttcatcagattttttccgcccggaccctgcatcatcttcatcatcttgctcatttggtcaaactgcttcattaactgatttacctgctcgactttggttccggaacctttagcgattctggcttttcttttcacgtcgattatcgaaggtttacttctttctatcggggtcatcgagtggatgatcgcctcaatatgtttaaaagcatcatcttctatctctacgtctttcatggcttttgaagctcccggtatcattccgaccaagtctttcatgttacccattttctttacttgctgaatttgcgtaaggaaatcatcaaaaccaaattcgtttttagcgattttcttttgaagttttctggcttcttcctcatcaaattgctcctgtgctctctctacaagcgacacaacgtcacccatacctaagatacgctcagccatacgatccggatagaaaacatcaattgcttccatcttctcccccgtacctacaaatttgattggcttgtttacaaccgatttgatcgaaattgcagctccaccacgtgtatcaccatctaattttgttaaaataactccatcaaaattcaggatatcattgaaggcttttgccgtatttacagcatcttgtcctgtcatagaatccacaacaaacaaggtttcctgaggctgaattgctttatgaacacgagcaatttcgtccatcatttcctgatctactgctaaacgaccagctgtatcgacaatcactacgttaaaaccgttagcttttgcatgtttgattgcgttttgagcaatttcaacagggtttttattttccggctctgaataaacctcaacgcctatttgatctcccacaacatgtaactgattaatcgccgcaggacggtagatatcacacgctactaaaagtggttttttatttttctttgtctttaagaaattggccagtttccctgagaaggtcgtttttcccgatccctgaagtcctgacattaaaataacagaaggatttccggaaagattaacaccggcaacatcaccacccatcaattcggttagttcgtctttcactaacttcaccagtaattgtcccggctgaagcgttgttaaaacgtcctgaccaattgctttttcttttactttagtggtaaaatctttagcaattttaaagttaacatcggcatcaagtaaggcacgacgaacttcttttaaagtatcggcaacgtttacttctgtaattttaccgtgtccttttaatatatggaaggctttatctaacttatcacttaaattatcaaacatacttttttctttatttgaagtgcaaagataatctaattaggcatttcaggcaatttttatttaaagttgaagtacgttttgattttaccgcaaagaacgcaaagttttacgcaaagttcgctatgttttttttgcacgcaaagacgcgaagtcgcaatttcttttctcgcagatctagcagatatagctgatttttttacatactttatctcaaaaaaatctacctaatctgtgagaacaaaaaagacgcaaagtttttttgccacgaatcacacgaattttacgaattttccaaactaacttttttaactctcgcagatttggcagatatcgctgatttttttcatacttaatctaagaacaaagcagctgtctaatctgcgaaaacaaaaaagacgcaaagaataaaacctttgcgtctttgtaactttgtccctttgcacctattttctaaaactggaagtaaataaacggttgcgaaccggcaactgctgttgcataaacgatccaatatgtaaatcccagaataattgcttttccgatcagaggcgttttatcaaaaactaatttcattttagaggtaacagcttccggcaagacatgccaaacgtatccgaatagcatcaataaaaagacatttttgtaacctattatgattgcctgccaatgttccggctcaaaagtcaactgaccaatattattgataacctgaagtgctgtttcaaaatctctggcacggaaaaatatccaacaaaaaacaacaaaatgaaaggtaatgacgattgaaaagaatttccataaaaatccagaacctttgccctctttttttggagggaagaattccatgaaaattttatgaacggctaatgccaatccgtgtaaggctccccaaacaataaactgtgctccggctccatgccacaaccctcctaacaacatcgtggtaaacaaattgaaattggtcaccaaggtttggtttttcttttttgaaagtaaaaaggtcaggcagaaaagcactaatgctccaattgcaatccctagtggaatgaaactctcgtttatgtttgaaattccccaaagcaataatccgaagaagaataaacttgggaataaaaaccctgcgaatgttccttcacgatttccaccgatcgagatatacaaaaagtctttcagccaggtggataacgaaatatgccatcttctccagaaatcagtgatagaagttgacttataaggcgttctaaagttggccggaagtttgaatcctaacagcaaagcgattccgattgccatatctgaatatccagaaaagtcacagtaaatttgaatcgcatacccataagatgccattaaattttcgaacgaggtataattcatcggggtgtcaaaaacacgatcaacgaaatttatagagatgtaatttgaaattactgttttcttaatcaatccaccaataatcaaaaacaaagcattgtttacatcttctctggtcaggtttaatttctgataaatctgaggtaaaaaatcttttgctctaacgattggtcctgccaccaactgtgggaagaacgaaacgaagaacagatattcgatataatttttggttggtttaatttcttcacggtagatttcaataatataactcatcgactgaaaggtatagaatgaaattccaaccggcagaaaaatatcgtgcagttcataatttccatgaaacatatcattgaaggtaacaatcatgaagttcatgtatttgaaataccccaacaatcccagattcagaattacactgatcaccagataaattttcttggtactgtcttttgcttctctgtaaatgatctgactcagtccgtaatcaacaacagacgaaagtaacaagagtaaaaagtaaatcccacttgacttgtaataaaagaaaagcgaaaagaggataacgtatgttaatctcaaataaaatgttttgcgtaaaaaggcatacacaaaataaaaaaccagaaataatcccaggaacaaaccggtattaaacagtaatttttcttcaggattgtatataaaccaactttgaacctgctccggagtaatcgctccaaaattctgaatgaaccaattatttatgctatctattgtaatcaacttaattctttaatttaaaattatcgtatgcttttaaaaatgcttctgcaaacaagtccccttgtttttcatatccttttttagaataatgaacccaatccgggccaattaatcccgaagactttaaacctcggattccttccatcgctcccaattcatcgtataaatcccaaactgcaaaaccatctgtctttgctatttcaataatactttttgcgtaatcgcgaatataaacattgggtcttcttgctttgagtaatgaaggaggcggagtcatcacaaggatagaaaccttacgattgtgttcttttacattttttataaaatcacgcaattcctttatataagccgaagcttccatatgatcgtagctttcatttgttcctaacgaaagaactataagatcgccatgcaatgcttttagctgttcaaaaaataacgggtacttattataatccgaaaacttggctccatttaccccaatactgctgtaaattaaacccggtgtatctcgttctaaaacgatcccgctcaattcgtactttgaagcttctttatttggaagcaggaaaatacgactcaacgttttttcagagttgtaataatgagtaaacgaatccgattccaaatttaaaggaacaaattctgaactcgtaatatttctgggtttagtctcgtttgttcggattttaagcgttcttcccgcgcgaatgttattcgatttcagacgattgtcttttctaatatcggctaccgaaacattgtatttatcagcaattgtcgagatcgcttctccttttttgatcttgtgcgtaattacttttcgctctgtagactgaattgttttggtttgagaggatatcgctaaatcaaacatgttctgattttgaggcgtaataattttgatggtattgaaattatacgcagcatctttaacattcaattcaacagcaaaaccgccattgtctctccaaagtgcaattccgcttaaaccaacaggaacatttttgacaggatgaatgtttcggtaactttcccagcctctgttggaatgaaaccgctcgttataagaaccgtttgttttcgccagctgatacggaaaaactaacccgcggccgccattaccaaacttttgctgcagtttttttctaatctcattggtcatcaaatcactctgaatgtgcgaatctcccacatggaccatattgattttctgactattttgactttcgtttgccttcaatttcaaaaaaaacggcactaagacttctgcattataaatcctgtctcccgaaaaagaatcaacagcggctgtatcggctttatgcatcatattttttgtaattggatttaaatctgtctttggtgttttatcgtttgttgagaaaaaaagacaacaaaagaagataattaatctattcatttacgctatctgtttttaccgctacggaatctgtattggtcttcctggctgttttccgtttgttggtatctgcctctctgtttacccgtaatactttatattgctcgtagcctttgttcaattgatcgtatactaatttaccaatagcttttgccccacgctggttaaagtgtgtataatctttattggctctggccggagattcgtctacccatttcaccattgatccgtcacctcccattaaggtgtacaaattcacaaatccggattcggtttcaagtgcgtatcttttttgagctctcattaaaggaacaacggctgaatcggttttcatttctaaatcatacttggtagatttatcggctgtcgaaatgatcaggatcgaaactcccggaaaagattctttaattttattcaccgctttggtcatacctctttgataccaattgtaatttttagtgccataatttaaaacgttggttccgtaatgcagaataaccaaatcgtactttaaactgttattgaacccctgcatcacattcgcattaaaagtagaaatcggcaaacctgaattccctctttgtgagaagttgtctacatgaaccccgtttccgttatcaaaattaaacccatagattggaatggaatcggcatgaataaaattggctttgaatccttttatgcttcccgaagttacttttagagtgttgatcagattgtttggcacaaggctttttcgcaaggtatcttttccgataatgaaattcacatttccttttttagttcctcttccgtaatacaaagtcggactatctaaagttgttgcgtgtttgtttaaacctgcttcgtactgaacccaggtcgtatttgatttatcattggcaaaaaacacgtgtccgtttacaccaaaagggctcgttggatgttttacgtttaagtacgattgcattttccagtttttggaagccgaagattttacagaaccacgtgatgctgcagattctgaattgatcgacacaaaaccaacaccgcttccgccaaaacgttcctgataattggcgcgaacatcctgcacaattaaatcaccatcggtcatggaatctccataataggcaattctgactttggattgcggattattctccagctggtataatttttcgtaaaaagaaatcaggtattggtatcctttgtagttatcgaaagtttcagacggaaattcgattccttccgaagcatcgaaaacaatcttttccctcatttcatttttctcatcttcggtcagactgtctccaccctgttccagagaatcatttgcgactgactctaaaagcagactatcgattagtacgtttttagaatctactttactatccgaaaagatcttgtccggcaagatttgcttaaacccgatgaaagctataaatgccagtgccacaatggcaaaagactgaaagaaataagattttgtattcactcgtaataataaatttgaagaaaggattcactaaaaatttcatttcaaaattcctactaattccttataaaaaagtacgggcaaagatagaattaaacaattaatttctaggttctttttaacattaaaataatacaaaaaaaagaggccgaacgaatccagcctcttgatcaaaaaaaaataaaaaaaataaagtcaatgattaactaaattttgaaatgaattgaatataatagactaggaatgtaaaaaccccgaacaaattaattattcggggtttcttatcttcttcttatttaagaattgcgtactctaaagcaacataacctcttattcctgcttcatttgtcatagccaggaatttaactttataataatttccggctgcatctttaaccacataaaaacgatctgttcttatgcttggcaaagtagttggtcctccaccatttctccagttagctccaataactctttgatctgttttagaaactgcaaaatttgcttcaactactttttctttagtaaatcctgcataggtcacatcagctgtaactaacacctgataaaccagagttcccgcttttgaattagttgtaataaagtcagaatatccataagtaacatcgcctttacccatatttaaatagttcgtaaatactgtaaagtttaagtcccattttgctttttgaggttcaacaacaactgtgtttccagttgttaaactgaaaaatgtaaagttaaaatcaacatcttttgaaattactttttctgtgaatgtagcagaagtcaaatcagcgtattggattttgtatccattaccacttcttaatattctaactttcttccatcctcttgaatcgccatcaacactaacggaacctttttcaggtacagctgttgacactttagctccaagattaactaagtatactttattgtctgcatctgtagcagaaacttcagcaatagccgttcctattcctgctccagcaccagctaaaacaccggttggattatcaacatatccgtttgatgcaggcgtctcaccatttccaactgaaacattggtatcaattgtctgagatactgtaatatctgatgtagctaattttttaacagccattttaaccgatccgttcaaaacaactctaaaatcatcaccagatgagaatccgaaatcccatgattctctgtttactgctttaaattctgcagcacttaaatcaagataaacctgacttggctgattaggacctccaacacttggttgtaaagttgctccaacggtcgggatctcgaccttagtatcgtcgtcacttgagcaagatgcaagtgataagaaagcgaatgataataataaaagttttttcattgtatttatgtattaagtatttaaagattaagattatatgctaatttaaaaaagtaagaacgtccgtatgcgagcattaaattcgaagatgttgcatgtgccgatcctccacttgttttacttcggtttacatcggttacattaaaaatgtttcttgctccgaccgttacttcaaatctgtctttgaagaaattctttctgattgatgcatcaaaccaattactaggagcgatagtagtcaacacatattctgatgcaccttcctcaaactgttgtgtttttccattgtatttgtaataacccgaaacaattgttttccactttggaatattataagacacacttgcatttaaattaaacgaatagagaaaatcatcgtttgaaacaattttttgattgtctaatcgctgcgaaactcctaccaatgcagctccaacattaatcgtcaagctatttaatctgaactgattcgttgtagaaaaattccacattctgtatttactaatattgatgtattgattttcaggcgtaccggtatttggattgttccctataaataccatgtcaattctatcattaacatccaggtaacttcccccaattgtatttgatatttgtagtcctgaaggaaaagaagtaaactttttaacacttgtttcataagaagtacttgtttccggaatcaagttttcatttcctgcaaaaaagtgcccatcgaaaatttgattcacatacaattcctcaaaatttggagttctaaaaccgttaccatacgatcccctcaactcaactcctttatcaaacaaatatcttaatgcaactgaagaagcatattgatttttaaatttagactgtgccgaaaatctcaatcccggttttatagaaaaccgatcggtagccataatttctgaagaaacaaaaaaatcatagttctctatcgttttataaaccgattcaatcacattattctttttttgaacaagtgcgaatcctttattgtttacaaattcatatcccacctgcaaatcaatacttttgtctgagaaaaaattatttaatgtccctgtagaggaaagaacttccatcgactgatctttcttcttctcgttcgccccttcagttttagtaaacaaataatacgtgaaattctctatttctcgctgttgcttctgatgtgtaacagaaacattatacgttaattgtgagaacagcgatccggttgcatttaaattatgaaagtacctgttggtaaaatatcttttatcatcagcagcacgataggatcccaaagtaggattaaaaagagactgtacagtactattataaaaatctacatcttcatctaagtactcaaatttatagaagaatcgaaaatcgtcttttcgatacgataacattgcgtttccgtttaactgatcttttggtaaccaactgtaacctcgcataaaatcagtttgaaagtaatccttaccctttttaccatttaaaaaaccttggaaatcatttctatttgctcctacacttacaaaccagttctcattaaaagtatgcgctacacgtaaagattgaatatgacgtcctttatcaaaaagagcgtattcttttccaacggtctcctcttgcactgcggcattaatatcccacttatatttagatgattttttagttataatattaagaactccgcttacagcattggctccgtagctaactcccatagaaccttctacaatttcaatatgatccacatcatttaggttaatctgagacaaatctgtattgttccccagaccggcttcattaactaatggtatattgtccactaaaattttaaagtattgtgcatctaatccaaacaaggaaacggttgagcgcccggttgttccactaggtctaacggtgatatttaaatattgatttaaaacgtctgctaagttatttgctgctaaattttgtatgtcctgattagaaatcacacgaacattaaacactgatttttttatagactgtggttcaaactgcccggtaactaccacttcagaaagtttatttacagccgtggtatctttcttttgtgcaaaagatatttgacaaaaaagaaaagctgcaaaaaagataaatttgattttcattatttttattcattcttaataatggcgcaaatatataaactatttttatttgttctaaattaaatacatatatttgcgaaaatttaaaaacaaaatattacgttatgatttcaaaaagcctctatttttcagctgttatggctttgacttgtagccttggtttcagtcaggataaaaagcaacaagacatcaaatccatcaaatctatgtgtggttgctacgaagtgaagtttaatttcgcagaaacttttcaatacgctaaagattctgcaacttataaaccatctgaaacaaaacacgaatctgcattagaatgggtggaattattagaagacactcctaacaaaattgtaatgcaacacttactaatagtgagtgacgatatgatcatcaaacactggagacaagactggttgtatgaaaacaccgacttatataccttcaataaaggaacatcctggaaatacaaaaaactggacaaaaaagcagtaaaaggtcaatggacacaaaaagtatttcaggtagatgatagtccacgttacgaaggatcttcgacatgggtacatgtagacggacaaaactactgggcaaacattgctgatgcaccacttccaagaagagagcaaaccaaacgtaatgactataatgttttaaaaagaagaaacattcacgaaattacagctacaggatggaatcatgagcaggacaatgacaaattggtgcgtgacgacagcggaaaagatgttttattagcgcaggaaaaagggctggacgtttacactaaagttccggatattaaatgtatcgctgctcaaaaatggtggaaggaaaacaatgcgctttggaagaatgttcgtgacaaatggcaaactctttttgacagacatcaggacttaaacttagaagctaaagtagacagaaaagcactttactctcttctgtttgatttaaaaccaactgctacaaaagcagaaagtgatgcaatcatcaacaagttcgtaaaataagaaattccttttctacttatattctaaaagccgatagtaacaaactatcggcttttttatgcataaaaaaaccgtctgaaaataatttcaaacggtctgctaccttctatgtttaattaggctattagcttactaattcaaaacagcataaaattaataagaggtcggtatctttaatcttttacgatcgatattctggaataatcatctcggatatgcttaaaaaaactcttgaggtgatattagagtctgtagataaggatgttagaatcctgtaatatttcattaattaaagtaggaaaattaatatattatttaatcccgtacaaataaataaggcactatttttttacttttttctataagactaaaatccagtattttgacgacattgcacaaggcagtataattaaggaatctacaaaaaaacaaaaagggccgatagttttacaactatcagccctttgattcatactatctataaaaaatatgtcttatatgaactattatttagcttctgcgcactcagaataggaaacaatatgtttcgttaaatcagtccatttcggctcaggatttgcagcaattactttttcacagcttccccataatggcacaaattcttttttataatctttcttcttcaataaaaatgcaggagaatcttttttggcaacataatacgattttgcatcacctccaataaatttaaccccgccaactcctaatgaagtcgtttcttttgcatgaggatcacagtatactttaaactctttactgaatgaagggttaagtaactgcattaacaatttgctgtttctctttttgatttttacatcagtagtttcaaaataagcgtacccatcgtttaagaaatcctggtttaacttatcgtcattccattttttaaagtcttgcagaaaatttaatttttttcctaagttatccaatccgcttggtggtaagtacatgaatttaatatcttctggttttagtttgtgttttttaccagttccatcttgtaatttgatgaactcaattaaacctttgtctctgtcgatatctttaatagtaccatttatttcggtaccatcagccaaagtaatgtaagccgttttactgtgagaaaatccataagaaggagaaatcaaatcttgcgcatttgcagaacaacacactactagaaacactagtagcaaaaaggaatttttaatcatttgttttttggttaatttttttgcctactcttgcgattttcggcttcctcgattattattttaacaggatttttttagctaacaccctgtatttattggcttcacaaactttttttataaattattttcttaccgtaaacatagctataaaaacaagatttacaaatgttaaactgtattttttacacgaaaattcgccccaaaaacctttgcctatttttcatcttaattaccttactttttctaataaaatacaaattattttggatggcaacattttagctaaccttccctttctactctcgaaaaccaatagattttttgattttgagccgacaaaaaaaagagtcgataattacatttataattatcgactctttgtattttatcttttgtacagcaattacatgcgctccggaacttcgattcccagcaaactaaaagcggctttgataacctcagctactttttgcgaaagctgtactctgaatacttttttagttaaatctacttctcctaatatgtgtaccgactgataaaaagaattatattcttttaccaaatcgtaagtataattagcaatcagagccgggctatgattgtgtgccgcattttgaattacttccgggaaaagttcgatttgttttaccagctctttttctttttcgtgtaattcttcggtattcgtctgagctgaaaaatcaaaatcagctttacggattatcgattggattctcgcgtaagtgtactgaataaacggcccagtatttccggcaaaatcaacagattcttcaggattaaacaaaatacgtttttttggatctacttttaagatataatatttcaatgccccaagaccaatagtttggtacaatttggctttttcttcggttgaataactgtccagttttcctaaatcttcagaaatttgtttcgctgtatcggtcatatcctgcatcaaatcatcagcatctacaacggttccttcacggcttttcattttccctgaaggcaaatcaaccattccatatgataaatgatacaagcttgaagcccagtcaaaacctagttttttcagaataagaaacagcactttaaagtggtaatcctgttcgttaccaactgtatataccattccgcccacatccggcatgtcttttacacgctgaattgcggttccaatgtcctgtgtcatatatacagcagttccatctgaacgcaaaacaattttacgatctaaaccttcatcggtaagatcaatccaaactgaaccgtcaggatctttttcaaaaacgcctttgtccagacctacctgaaccacatcttttcctaataaataagtattgctttcgtaatagtatttatcaaaattaacgcccagattggtataagtagtagcaaaaccatcgtaaacccattggttcatcattttccaaagcgaaattaccgcttcatctcctgactcccattttttaagcatctcttgtgcttcaataatgattggagactgttttttggcttcttcctctgtttttccggtttccataagttgagaaatctcccctttgtaagctttatcaaactcaacataatacttccctactaatttatctccttttagatttgaactttcgggagtttcaccatttccaaacttctgccaggccagcatcgatttgcaaatatggattccacggtcgttgataatctgtgttttgtatactttttttcctgatgctttgataatttcagctacagaataccctaacaaattgttacgtacgtgacctaagtgtaaaggtttattggtgtttggcgaagaatattcaaccatgattgctttctcttccggatttggtgttacatatccgaacttggtattgtcttttatttcattaaagaaattcaaatagtaactatccgcaatgacaatattcaaaaatcccgaaaccacattaaagcgtgctacttcagaaacgttctctaccagataatttccaattttatttcccagttcgacaggattgcttttaatcactttcaataaaggaaaaatcaccattgtgatgtcgccttcaaattcctttcgggtggtttgaaattcgattttctcaacagtaacatcaaataatgcttgtattgctttttgtatagaaggtgtaagaatttgtgataatgacatgtaaacttattttaaagtgtgcaaatatactgcttattcaccaattacagaaaatcaaaaacatattaaatcgaataaagcggttctaatttcttaaaaaacctccccttttaagtgttaaaattatgcaaaaaccaaaacgctaacccattataaaacagacgatcttacggaagaaatattttttttcacttttttctgtaacatatccttagcaaacgagtcttaatagagacttcaaattagttttgaggacaaaaaacaaaaacaaaaaacaatcatcatcaattcatcaaaaaatcattattgcattatgaaactaaaattctttctgttcgtattactgggtgtaatgacaacagcaaatgcacagaattcaggaagtgtttccggaaaaattactgaaaaatcaaacagcgctcctatttcttatgccaccatctcggttaaagagaacggaaaagtagtcgcaggagttaattctgatgatcacggagatttctctatcaaaaatctggctttaaaaagttatactatcgaaattcaatatattggatttagaaaatatgtaggctctttacttttaagcgataacaaaaaaacggctaccattaatgtatcacttgaagaagaagctactcagcttaaaggagtgaacattgtaagtgagcgttcgacaatcgagcaaaaaattgaccgaaaagtaattactgtcggaaaagatttaactactgccggagcttctgcctctgacatcatgaacaacattccctctgtaaacgtagatcaggacggaaaactttcgcttcgcggaaatgataacgttcgtgtattgatcgacggaagaccttcaaacattgatcctgctcagttgttgaaacaaattccatcaacgtcaatcaaaaaaattgagttgattaccaacccaagtgccaagtacaatccggaaggaatgtctggtatcatcaacatcatcttacacaaaaataccaataccggtttcaacggaagttacagtgggggaattacttttggagaagtagcaaaatacaatcagtcattagatttgaactacaagacaggaaaagtaaatttctttggaaacgtaggacaaaattttggaacttattacaatgatggtttcatcaacagatacgatcaggacattcgtcaaaaaattgatgttgtgaacgaaaatgattcttacctgtataaaattgggatggattattttatcaatgatcacaatacgatctctttttataccaatcaaaacaaatcaaacggtaagttttttgtagacaccaatattgattacagcaatgtaagcagttctgatattgctaacatgttacaaaaatcaaaatatactggtccggataacgtaggaacttataatttagcttacaaacacatctttaaaaaagaaggtcataccttagatattgaaggaaactatagcgacaataaagaaacccaaaatgcaggttttgacacgcaaataagaaaaaaagacaatactttagacaatcagtcttataacgattatattgccggcactcgtaaactaagtactttaaacattgattacgtaaatccattaaacgacaaaacgactcttgaagcaggtgccgaagccagaattacaaaaacagataacgattatatcaccggaaatccgttagcaacacttccagtttctaattatacttatgatactgatatttattctgcttatgtaacattcggacagaaattcaaaaaattcagttatcaattaggagctcgtttcgaaagttataaagtggttgcgaatttaaatcatggtcttgacaaattcaatgacgattacattacgttatacccgtcagcatatttgacttacaatctgaatgagaaaaatacgttacaattgagctacagccgtcgtgtagaccgtccgagtttagaacagacaaaacctattcgtgagttttctactcctacataatagagtgatatatgttttgtaataaatatttcattacattctaaatcatacctaaactttcctaaatggggatttttcgaaattaaattagtacttcgtaaaacttcattcacaaatttttgtgcgatttcaatatttctatattgaattaaataattacgtgttgtataaaaagtatatttagcttttgttgaccaaacaattttcattattaaaaaattagcttagtaaatttatagaaaaacacctacaaaagtatttacaattcaaatctttttccttgttcaggataaataattttaacctttaagtcattttgtttttgcagctgttctttaagttttataatatttttagtgggtggctttagatgagtcacaataataggaaaaccattcaaagtaccttttcctgctaattcttctaagacatgaagctctttcatgagataatttggagtcagatgtccgaataaaaactgatccggttgttcatttgggaaggaaacctcaataaaaataccttttaattgtttgcttttaatcaaaggcgcaattgctgtccaaagagactttaatttatcgcttttctctacagcatcaggaccggtatcgcccagatagagtacatacgattcaccatttttaattaagaaggcagtgctttcaaacggattcacatgacttaacggaaatgcttttgccgtcatcgtggtattggtaatcggaatttcttctgctatatttaaagtctgaaaatggtatttttttaatggagttccgggacctttatctccaaaattggcccaggtttgatcattgaaatagtgattttccatcatttccatacatttttcagtggcataaaccgtcttggaagaatcagcaggagagtttataattaaacccgaaacatgatctaaatgggcatgagaaacaaaataacctttaatgtattttcgtaaaacttcgctggttgaaactttaaaaaccttgttttcaattgctttttcaattccggcattcacagttccggcatctaaacagataaaatcattggtgtgagtaggggcaactaaataggctgaaagattcttctcatctattcctccttttatgcctaacggaactacctgaaaggaagattttttttctttttgagaaaaggcctgaactgaaattaaaaggaaacagattaaaaatcggttaagaatagacatattagagtaattttagtaccacaaatttcatcaattaagacgaataaatcatgatagaaagctgtgattcattttaattaaagctaaatttacctgattttaacaaattagtttggtctattttcggtccgaaataatatctttacataaaaatataacaattttaacaaaaaaagttacaatgacaacaatagcatcacagtttggaatgaatgaggctctggaaaaattgggcatcaaatcaataaacgaaggaacatcaacggggctggagaatttttcttcaggagaaattttaaacagcttttcaccggttgatggaaaattaatagcatcagtaaaaatgtcgacgcctcaggattatgaaaaagttatgcaggcagctacagaagcttttaaaagttttcgtttaattcctgcaccacaacgtggagaaattgtgcgtcagtttggacaaaagcttcgtgacaataaagaagcgcttggtaagttggtttcctacgaaatgggtaaatcattgcaagaaggttacggtgaagtacaggaaatgattgatatctgtgattttgcagttggtttatcgcgtcagcttcacggattaacaatgcattccgaaagaccgggacaccgtatgtacgagcaataccattcgttaggagttgtgggaatcatttcggcatttaactttccggttgcagtttggtcgtggaacacggctttggcgtggatttccggagatgtttgtgtttggaagccttctgaaaaaacacctctttgcggaattgcctgtcagaacattatcgctcaggtgatcaaagaaaataatttaccggaaggaatctcttgtttgatcaatggcgactataaaattggagaattaatgacagcagatacgagagtaccattggtttcggctacaggctcaacccgtatggggaaaattgtagcgcaggctgttgccggacgtttagggaaatcattgttagagttagggggaaataatgcgatcatcgttactccggatgccgatattaaaatgaccgttattggtgctgttttcggagctgtgggtacagcgggacaacgttgtacatcgacaagacgattaatcattcacgaaagtatttacgataaagtaaaggatgccttggttgctgcttataaacaattaagaattggaaacccattggatgaaaacaatcatgttggaccgcttattgacacgcatgcagttgaaatgtatgcacttgctttgaacaaagtggttgccgaaggagggaaagtattagtagaaggcggagtcctttcgggagaaggttacgaaagcggctgttacgtaaaacctgcaattgccgaagctcagaattcatttgaaattgtgcagcacgagacatttgctccagtgttgtatctgattaaatattcaggagaagtggataacgctattgatcttcaaaacggagttgcacagggattgtcatcagcaattatgaccaataatttgcgtgaagcagaaagatttttatcagtagtgggttctgattgcggaattgcgaatgtaaatatcggaacttctggtgctgaaattggaggtgcttttggtggagaaaaagaaaccggaggtggtcgtgagtcaggatctgatgcctggaaaatttacatgcgtcgtcagaccaatacaatcaattatacaacgagtctgcctttggcacaaggaattaaatttgatttgtagaattcgtttttaataacagttataaagtacaaaaggcttccaaatttggaagcctttttgaattttaagctattgagtgctttatttttttagaacagtttggttgaacgagccttcattagtataaacttttactaagtaggtacccgaaattaaattacttacatcaatgctttcaacatttttgcctacactttttactaaagttcccgacatattgtatacctgaactttttctatactttgcgctgattcggagaagtataaaacatttgaagccggatttggatataaaatcacctttgaagcttttgattctgcaggaatttcagctgtttgtgttgttcttagcgtacttgcgctattgtattctgtactgatgtagaacaaattggcaacagaaccttttgtaatggtattggatcctgcaggaattgaagccgtcacccttccggctgatgcagtgtatgagacattatttactttgatcgttccggtaaagttagagtcgaaaaccaaggttaatgttgaaggactcgtagtagtataggtaatggtagtatttgattctattttgagacgtgctgtaagagttaatcccgcataggttactgatccgttagttgaattcatatttcccgtaatagtgtaaaatgaacttgtttttccggatgttgtaaagttatgaatctcatctccggcaggtgttccggtagtaacagtaatagttcctgaacctgttgctggagttccggttccggttgtagctatcgaatacgacacgttagcacttggagttcctgtaatggtgatcgttttggcactggtattttttacaaaactaattcctgaagcaggcaatcctgtaattgttgcatctgttgcagttcctccccaggtaaaaacaatcgttgcaattgcgtttccgctggcaactgtttgactgttattgtttgtggatgtcagtgtttgcgtgccggctgtggttactgtaatggttcctgaacccgttgccggagttcctgttccggtagtggcgatagagtaagaaacagtagcggttggagttccggtaatagtaatggttttggcgctggcattttttataaaactaattcctgacgccggaagtccggtaaccgttgcatctgttgcgtcgcctccccaagtgtaaacaatcgttccgatagcagtaccgctggttacagtttgattgttattggcagttgccgttagggtttgagaacttgtaggcggattgccttctccctgaacagccactaaagttccggtgtaattggtaagtgccgatttcagtgcggtgattacaagtgaagaggtgtcatctacactattatcaaaagtccattttaaatcgcctcccgaaacacgtccggcgtattgagttacttttgttttagcagtcgccggttgttcgaggattaaatttttaacgtatagtgaagcatcagtatcaaagttattgtaggtattggctcccgattttgatttaacagcgctgcttactgtttcacctcttgtcgtggcaacataagcatcaaagtcggttgttgagctaatttttcctgaaatattgtataacggattaggatcgttataagcaacgaaacgcatgctattcgttccgtttgaagcatcaaaggtattgttgaaagctttaattgatcctccggtttcccctgagaaagttcccatagttccggcattgtttacctgattggcttcgtcccagatatcagtaccctgcaaagaagttaacatggggtgcttgctgttgcggaagtaatttccttctatgaataacgaagatcctaatgtagaccccgaaccgtatttggctacaccatcaaaataattgttgtaaatgtgagcggaataatagcgcacacgaggatgacgcgaatcagaatgatcgaaccagttgtggtgataggtgatgtacaaaccacttgtagtgccttcgcttagccccaaaagacttgcttttccgttgtcccaaaagtgattgtaagacagggtaatgtaagttgatgttttattgtctaaagctccgtctcccttaatttgatcagcatcgcttcctgcatttccataaaataaatcgcagttgtgtacccaaacgtggtcattgtcttgttgcataccaacattgtcacccgcggtactgttacagttcataagaccaagattgcttacctctatgttcgatgccgatttcaaacgtatgccccagccattggcaacagcatcatttcctattccttcgatcgtaaggtaactggctgcattgttggcattttcaataacaacatctccgccttccatcacagacatgtcggtaatatttccaattaaacgaatgataaacggacgtgtatcttttccttttttgatggcatacaatatattttgtaaaccaacacaaggatttgcactggctccggtgatattcatcgaaatagtgtttttggtattttgtgtgatgtataaaataaccgcattgtctttcggagttccgtcagctttgtatcctcccggaacgcgtccgccctcaaaagcaaatccattacgatcatgggcagcaacggttaacgaacctgttgttgaaccagtaccttctgcacccgaaatgactggtttgatcttaacggtgtaagatcccgcttttagacccggaatgtccgcacgaaaataacttccgtaacttctgatcaattggtcgtcaatttttttatcggtgactccattaccggagtaatacacattgtaggtttgtgcattgcttacaggctgccatttaacaaatgccgattcaagccagcccgaggattcggtaatctgtacttgttgtgcccataggggtactgtaagtagtaaaagcaggtgaatgagtaggttttttttcataattgtggttttttggttaataaagttttttgtgattttttgggtattgcttcaataaacaaatttgtaatcgattacacaaaaatatgttatttttcgatatgtgtaaaatatttgttataaaaaagtaaaaatgataaaaaattatacttttaaatagtgataatgtaataaattgcattaattgtaatttattacataaatacgatgggttttgtgaagtagcatttttattgcatttgagagcatattggaggaaagaaaacaaatgcaataaaacgaaaatatagatttataacattttgagtaatttatgttatagaggtggaaaagttgcattttgtgatttaaaaatcatcttttctacagccgttcataccttttgagatgaaaaaagaaagtagtagagaaaggtgtctgtgaattctgcagtattgattagattgaagttttaaagcaggctgaaagcttaaaacagtagtatagtgttaacatggagtgggcattagcctgaggggtaagagcataaaaaaaaagccttttgaatatttcaaaaggctttggttatgagaaaaagaaagaattaatctttgcttgataattttgataatagtcgtaagaattcaatgtacaaccaaactagtgtgataattagtcccattgcgccataccattccatgaattttggcattctttgctgtactcctttttcgatctgatcaaagtctaagaataagtttaacgcagcaataataatcacaaaaacgctaattccgatactcatcatggagtttccgtaatgaacaggagtccagcttgtgaataaagagactaaccatgaaattaaataataagtagcaattgctaatgttgccgcaacaacaactgacttaaattgctccgttacttttacgattctgaatttatataaaccaaggcatactaaaaaagtaaccagagttgcgccaacggcattaattacaattccgggatatttggcttcaaagatggctgaaattcctccaatgaatagtccctcaaataaagcataaccaggagctaaataaggagaagcctgaggtttgaaggctgaaattacaactaaaattagtccaatgatggcaccaccaatagctggcagcatcacattcatcccattaaatgccatccaccacgttaccatggccgatccgcataaaattaaaaacaaaatagccgttttgttgattgtacccgataaagtcatctcctgattgtagtcgataatttgtgcctgatgtacttcttcagcttttgaaacagcattagaggagaaacgcttgttgcttaaaaatggattttttgaattgaagttcataatgtaattggttttaaaaactcatcaaatataatcgatattttttgatgtgccttgattcctatggaatttttaacagtttggggacgattgttttgaagctttattcctgtaaataaaaaagccgtcaatgaaaattgacggcttgtatcttgatgttgaattttttattttaaaacatctaaaactaaagaagggaataaacctaaagcaatgtttaaagcaattgaaattactgcaaccgcataaataaggaaaggttttcctgtacgttcctgattcggctctttagagtacatcgctaagattagtttgaaataatatccaacactaataatggagttgataaccgctacaattactaaagcaatgtatcctgcctgaatggtttggttgaacaagaataacttagcaaagaaaccggagaaaataggaataccagccatagacaataacgaacctgtaaggattgctgccaatagaggatttgtttttcctaaaccatggaaattggtaatatcttcgttatcctgatttttacatacgtataaaacaatactgaatgcagcgattccggccaatgcatacgcagctgtgtaatacaataaaacacctgctgaggttgctatcgttagcaaagtcattaacataaaaccggcatgcgagattcctgagaatgccagcatacgttttacatttacctgacgcaatgccattatatttccaactgtcatagaagcgattgaaacgattacaacaatagtttcaaaagttcctaaaagatcctgattgtctagtgatggaatgaaattcaatgcagaaaccaatttataaagcgtcgcaattgccacaacttttgccaaagtactcattaaagcagtagtcaatgcaggagaaccttcgtaaacatccggagcccagaaatgaaaaggaaccgctgctactttgaacaacataccaataatcatcaaaatcattccgattggaaaccagattggtaattcggcagataaagagatttcatggatttcagctacatcaaaagttcccatcgctccgtaaatcaaacagattccgaataaaatgattcctgatgcaaaagatcccattaagaaatatttcataccagcctcattacttttcaagttcaaacgatcacttgctgccaaaacgtaaagagcaattgatagaatttcaattcctaagaaaaacatcgctaagtttccgaaagaaaccatagccactccaccggctaataaaaatactttgatcgcaacgaaatcggagattttggttggatgattttcgtaaaaattatgacttaatgctaccaggaaaatggtcaacacaataaacaacgatgaaaatgtcacagagaacttactcactgtaatcatattgttatagtaacttgctgttgatccgaattcgtaaaagttaagtgccaaaacacctagtaaaccaatgatggtaataggaacaatggcctttcttaaattaagaatttcaaacaataggcagaaaatacccaatcctgttatagctattaatgtattcatttttgtttttttgatttaggaaatctaaaactaatgacgccctaatttatttttatttaaaatattttttaatttttttacagtgtttaactttttaagtttctctataaatctgaaatcagaaatcgttaatccgtattctaaaatcttagtttttatggataacgttcagaatcgtttctaaacttggtgtaatcaaatctgtaattggttttggatagaatccgaagaaaatcaacactgcaataatcgctactaatgaaattccttcattaacagaaacgtcagcaaaagttttcgaattggtttctcccaacattacattttgaaacattttaagcatataataagctcctaaaataatagtagttccgcctaaaacagcaaaccagatattaatttgagaaagactatacagaacagtaaattctccaacaaagttaaaagtacttggtaaagcaacagaagccaataccaaaattaaaaacatagaggtgaattttggagattgtgtacgaataccgcctaattgtgaaatttctctggtttcatatcttctgaagataatttcggctgcatagaacaaacctactactacaaaaccgtgagcaatcatttgcaatacagctccacgtaaaccatcaatagttagggtgtaagttcctgcagcaattaaaccaacgtgcgccaaagaagagtaagccaataatttctttaagtctttttgtcttaaagctacaattgatccgtaaatcacacccgcaattccaagagcaataaagatgttcatgtattcttttgctgccaatggtgcaagtggcaattgccaacgaataacactgtacaatcccatctttaacatgataccggataaaagcattgttccaaccgttggtgctttttggtacacatttgcctgccaggtatggaaaggaatgattggaattttaatagcataagcaaggaagaaagctaagaatatccataattgctcgcaagctgataaatttaatttgtacaaatcttcaattaagaagcttccggctttctgatacaagtagataaaagcaactaacatgaacaaggaacctgccagggtgtagataaagaatttaactactgcttttctgcgttcttcggcatcaccattcccccaaataagggcaataaagtagattggaataagcgccaactcccagaaaatatagtataaaagaccgtctgctgccaggaatgttcctgtcatagcaaaggccataaataaaattagagcataaaaacctttggcatttttgtattcgttaccaaaagaagaaaatataataattggcgttaaagctacagtaagtaaaagcatcgccatacctaaaccatctgcgtttaaagcaaatgaaatttttggctgagtaatccaggtattgatcaggctgatattctcaccagctgaaaaatgatttaataaaacaattgaacaacctaaagccgccaaactaaagaacaaagctacttttgatgctagtttgtcaccaacaaaataagtggcaaatgcaccaattagaagaataattaatataagagaaacgttcatagttgtaaaattatttagctaaaaatatataggaaacaatggcacaaagccctaaaacaaatgcaaaaagatataatccgatacttccgttttgtaattttttaccttgaaaagccaattcgttggctacttttcctaatccaaaaacaagggcagacagaccagtttcgatatagtctctgaaaaattttgataatgcattaacaggacgaacgaatactgcatcgtaagcttcgtctacataatatttgttgtacaatactttggtcaaaccgctaatgttttcatccgcttccggaacattatcctgtttgaagtatttcacataagcaattaaaatacctaataatccacccaaaacagcaacacccattaacgtgtattctgtggtacctaaatggtgctcttcacctgcaacttttgtgaaaagaggggctagataaccatttaaccagctgtttccaggtaaactgatcaatcctccaaaagtagccagaatagctaaaatcactaaagggaaagtaatcaatccgtcactttcatgtaagtggtgtttttgctcttcggttcctctgaaatctttaaagaaagtaaggaacatcaatctgaacatataaaaggctgtcatgatcgaagcaatagatcctactacataaagaggaatattgtgatggaaagccgttaataaaatttcgtctttagagaagaaaccggagaaaaacggaacacctgaaatggctaatgatgaaattaacatcgtccagaaagtgataggcatcgctttacgcaaaccacccattttacgcatatcctgctctccgtgtaaaccgtgaattacagatcctgaacctaagaataaacaagctttgaagaaagcgtgtgtgattacgtgaaaaacagctacttcataagcaccaaatcctaaggctaaaaacattaaacctaattgagaaacggtagagtaggccaatacttttttaatatcggtctgaaccaaaccaattgttgcggcaactaatgaagttacagctccaataacagcaataaccgactgaacgtccggagctaaatcaaatacaaagttcaaacgggtaatcataaagataccggcggttaccattgtcgcagcgtgaatcaatgccgaaaccggagttggtcctgccatcgcatctggcaaccaggtgtataatggaatttgtgctgatttaccacaagctccaataaacaaacataaagcagctaatgaaagcaatgggatatttaagttcgatgctcctgcgattgccgtttttaaagtagcataatctaaagtagagaacatagcacctagtatgaacattccgattaataaacctaaatctccaattcggttcatgatgaaagcttttttcgcagcatcattgtaatcctggtttttgtgccagaatccaattaataagtacgaacaaagtccaacaccttcccaaccgatgaataaaactaacaagttacttcccattacaagagtaatcatgaagaaaacgaacagattcaaataagcaaaaaacttgtgcatattctcatcgtcgtgcatataactgatagagtataaatgtatcaatgatccaataccggttacgaaaagcaaccaaagtaaagacaactgatctagtaaaaatccaagattgatctttaaattactaatttgaatccagtcaaataaagtaacctgaagcgcttgtttggtttggctcacctgattgaaaaagaaaagggtaacagcaaaagaaaccactacagcagcagttccgatgattcctgaaacggtttttcctaagctcttgccaaagaaaacattgattaaaaatcctaaaaaaggagataaaactaaaagtaaagctaaattggtatccatttttatttatccttttaaattttttaaattatcgatactaatcgaacctaaatttctaaagatcgaaactaaaatagccaatccaactgcgacttctgctgcagcaactgccatcgaaaagaatacgaagacttgtccctgcgcatcctgatggtaagttgaaaaagcaacaaataaaaggttaacagcattcaacatgatttcgatagacatgaaaacgataatagcgtttcgtctgtacaatacaccaaaaataccaatacagaaaagtacaacactcaaaaagatgtaattttcaatacctatttgatttaatatattacccattatttatttaatttttcttttttagacaataatacagttccaatcatggctactaaaagcaagatcgaagcaaattcgaacggaaccatatattcgttcagtaatattttacccaatactttgattgattggaaatcttcacccgttgagtcgtattcgccaacaattggtttagagttgataaaaatggcaattaatacgatgcagatcaaacagaaagaaacaatggcgcccaaacgagtaattctgggacggtgtacttctttttgttcgttcaggttcatcaacatgatcgtaaacaggaacagaatcataatcgctcccgagtagactataatgtgtacgatagccaaaaattgagagtttaatagtaaataatgaccggcaatagagaaaaaacaaatcactaagtaaatagcactatgaattgggtttctgctaaaaatagtcaggaaagcggtaatcaccgtaataaacgctaagaaacaaaatataatttgtacagttgttgcgtgtgcaaaatcgggaatatgtatcatttagttagcattattaagttgggcatttttgatagccacatcaagaggcatcactaatctgtcttttccaaaaatgaaatcttctctttcatagcttgaaggtaccaaaacttttgaagtcgtcaggtaaatggcgtctttcgggcaggcttcttcacataaaccacagaaaatgcaacgtaacatattgatttcatagattgaagcatatttttcttctctgtacaaatgtttttcatctgctttacgctcagcggctttcattgtgatcgcttctgcagggcatgataaagcacataatccgcaggcagtacagttttcacgaccttgttcatcacgtttcaattggtgctgaccacgataaaccggactcatttcacgcacttgttcgggatagtgaatggtcaccttttttctgaataagtgtttaagcgtgataaacaatccttttacaatcgccacaagatacaatcgttccataaaagtcatctccttgttagagaccaccttttttctacccgataatgatatagtttctattgacattttttaatgtatgatttacgattcactatttgtatgatacaaattaaatctgttttatttttcttttcaagctaatcctgctatccgctgtatcttttgtctcgttcaaaaacgagatcacaaaaggatcccgctgctatcagggctagggcattacggttcttagaatcctaaagctgctgcgatatcgtgtcttaatattacagcacccgtaatcataatgttaataatggaaagcggaattaaaattctccatcctaaattcattaattgatcgtatctgaatcttggaatcgtccaacgtacccacatatagaaaaagatgaagaagcatattttaacaaacaatactgcgatacctaaaatatttcctgcgtttacccctacattatcaaccatccattgcattccgggataattgtatccaccaaagaacaataccgagataatagtggctgagatgaacatactcgcatattcagcaaacaaatagaatcccattttcatcgatgaatattccgtatggtaacctccaattaattcgttttcacattctgctaagtcaaaaggagttctgttcgtttcagcgaaagaacaaattaagaagattagaaaagataacggctggtaaaaaacattccagttcattccttgttgttgtaaggaaatttcttttaagcttaaagttccggtcatcatcaataaagcaatcatcgataatcccatggcaacttcataagaaaccatttgtgaagctgcgcgaacagctcccatcaaagagaatttattgttagaagcccatccaccaatcatgataccataaactccaacagaaagaacaccaaaaatatataataacgcaatattgatatcagtcgcctgtaaataaacatcacggccaaaaacatgtaatttgtctccccaaggaataacagcactggtcattaaagccgtactcattgcgattccgggccctacgataaataaaaatttatttggtgtattggggaaaaactcctctttcgagaataatttcataccatctgcaagaggttgtaataatcctccccatccggcacggtttggtcctacacggtcctgtaaaaaagcagcaactttacgttcagcccaggtagaatacattgccataatcatagtaatcgcaaaaacgacaacaataacgacacttttttctataataaatgcactttccatttcttaagattttttatcattagtaattaatggaattgctgccatactaatttttttacgatcaatatctctacctaaaaggatatttttctctgtatcgatttcaactttctctaatttttgagtgtagttgttttggttgattacagaatctttttcaaattctcttggtccttcaattacccagtcgcttacatttttatgatcgaaacgacagctgttgcaaatgaattcttctacttcatggtactcgtctttacgaccggtaacacgttgaatttctcctccaaacatccatacggttgttttaccacaacatcccggagttgtacattctctgtgagcgttgaaaggtttgttgaaccatactctggatttgaaacggaaagttttatcggttaaagccccaaccggacaaacgtcgatcatgtttcctgagaactcgttgtcgattgctttagaaattccggttgaaatattagcgtggtcaccacggtctaatactccgtgaactctgttgtctgtcaattgatcggcaacttgtacacatctttgacataagatacaacggttcatatgcagttgaatattcggaccgatatcttccggttcgaacgttcttttttcttcaataaaacgtgatttcggatttccgtgctcaaaacttaagttctgaagatcacattctcctgcctgatcacaaataggacaatccagcgggtggttgatcaataaaaactctgttaccgatttacgggcttctgttacacgatcagaagatttactgtttacttccattccgtccatacatcctgttacgcaagatgccattaattttggcattggtcttgggtcagcctcactacctttcgaaacttcaactaaacaacaacggcattttccaccgctgccttttaattttgagtaataacacatggctggcggaactaaatctccaccaatcatacgtgcagcctgcaggattgttgttcctggctctacgtctatactttgaccgtctatggttactttcatctcttacttttgtttttttagtttcaggtttcaggttccaggctttcacttgaaactaaaaaactcgaaactttaaactatatttttaaactgtttgtttgcctactaaatgcttcacttgtgagaaaggttcagctacaaagtgatctctattcttaattttttccgggaaacgaacgtgatattcaaattcatctctaaagtggcgaattgctgcggctaccggccatgaggctgcgtcaccaagtggacaaatcgtatttccttcgattttactttgaatgctccacaataattcgatatcctcttcacggccctgaccgttttcaattctccacaatattttttctaaccatcctgttccttcacggcatggcgtacattgtccgcaagattcatggtggtaaaaacgggcgaaattccaggtattacgaaccacacaagcggtgtcgttgtacacaataaatcctccggaacctaacatcgatccggtagcaaaaccaccatcacttaaagattcgtaagtcattaaacggtcttcaccgtttgctgttttaaaaattaattcagcaggtaaaattggcactgaagatcctcccggaacaaacgcttttaaaggtctgctagaagacattccccctaagtactcatcagaattcatgaattcgtcaacacttaaacccaattcaatttcataaactcccgggtttttaatgtgtcctgaagccgaaatcaatttagttcctgtagaacgtccaatacctatttttgcataatcgtcaccagaattgtttacgatccaaggcacagtagcgatagtttctacgttgtttaccactgttggattggcccaaagtcctgaaaccgccgggaaaggtggtttaatacgaggatttcctcttttaccttccagagattcgataagtgcagtttcttctccgcaaatataagctccggctccacagtgaacgtgtaactctaaatcgtaacctgtacctaatatgttttttcctaaccaaccggctgctttagcttcggcgatggctctttctaaaattttgaaaacccacatatattctccacgaatgtagatataagacaggttagcgcctaaggcataacttgaggtaatcattccttcaatcaataggtgaggaataaattccatcaaataacgatctttgaaagttcccggttcagactcgtcggcattgcaaactaaatgtcttggttttcctgattttttatcaataaaactccatttcattccagcagggaaacctgcaccaccacgaccacgtaatcctgatttttttacttcttcagtaacttcatccggcgtaagtgtttttaaagctttttctacagaggcatatccaccattttggcggtatacttcgtaggttttaatacccggaatgttgattttatctaataatattttctgtgacatcttattttaaaaattggtctaaaaatccttttaaaggctttaaatgttcatttgtagttgtatctaaattccacatttctgataaatactcattatttttattccttatacttgaataaagatctttatatactataattttccccttcttactagatggaattgttgcgtcggcatttctatcatttacgatgcaggaaataaaatcatcccagcatggggttatatttttattaaatgataattctaacaattgttctaaattatgactttcattattattgaaaggtagatagaatcgattaattgtggttttttttccatttagccaatcttgaatatctttttcttttttggaaatattatcacttttatcttcatctgcatcaaataaagagataaattttatgttttcattctctgctttaagctttataaaaaaatttgaatttatctgattttttaattttgcccatccaccagtattttcagtttctgtacttcccttatttgtgtcagtaacaacaatttttttgttaccaaccgtaatttcatattccttctctgtaacatacttttgttttttaatgtcagagtcacaataattttttaatataaaatctctaaagaatgaaacatcattcttgtcttctaccaaaagaactacatcaatcatatatcttttctcctctaaatggtaaatttttaattgagtactctatgttttcaaaaccagaaacagttccagagaaaacggtttcttttgattgaaaaagttcaattaaccttatatcgttttgaatcgtttcgttcaattctttagaagcttgaaaaaaagcttctgagcattctttagaatgcgttgtggcgaaaagttgaatgtttaattccttacaaagctgaataacaattttccaaagttctactagttttgtatgatgaatcccagtatctatttcgtcaataataattttattataatcgctggacaataataaaatagttatgtaaatacttcggacaaatccttctccgtattctcttatattgtgaaactcatctctttcggttgttttaatcattaagcttttgaaagaaagtagatttatttctgaactttgaaattcggtaatttctatatttggaaataattttaaaattatctctgaaattttaacgcctaaatttaattttacaaaaatctgctcataatgtttgcctaaaaacttttctaattcatcattaagcattaatgaaggaatactaggtattttgctattttcgggtttgttgatgaagttttcgtaataagtggatgttaggtctagtaaaaactttacatcatcattatttttaaaaactatccagttttttgatttctttcttataccatcataatcaaataaactaaccttatctgtgaaattttttaaatcttcttttgaagtcttatgtatttcttcaaatatgttttcaattgaatatctgtcctcatttatctgaaaaccgataggtcgttttttgtttttctggtaaaaagtaaaagtattgctctcaaaatttaactctttgttttcttcatttaagagtgtaaataaattgggaattagtcttcttttaattaataattcatgaaaccaattgattgtgttttttggtcttttatcaaacagcaaagcctccagtagacaagttttaccaacattgttatctccaacaatcaaattaaattgcccaatatcttgtatctcaagagagtcaaacttcttgaaattttcgattttgaaatatgttaaatgattgttttgcacttttatttatcgtgtaatattattttatcctctctgcaatcagcgattaactgatcgattttttcttctgtcaatttttctttgtagaaatctcccaactgcatcatcggagcgtatccgcaagcgcctaaacattctacaccggcaatggtaaacattccgtccggagttgtttctcccattttaatgcctaatttttcagaagtataatccattaaattttcagcaccgtttaaacaacaacaagaagtctggcaaaattcgaacatgtattttccaattggtttttggttgtacatggtataaaaagtaaccacttcgtaaacctcaattggtttgatgtgcaaaatttcggcaactttatcctgtaactctgtactcaaccagttgtcatgagcgtcctgtacttcgtgcaaaacgggtaacaaagccgattttcttttgtcctcaggataatgactgatcaattcattgatgcgggacatcaatgcttcggtcatgtttatttcttgtttgtaatgttttcgttccatttttattttagattttagattttggatttcagattttttcaatctttgtccattaatccatattctgcaatcttttttaattttagatttctgattttagattttagatttttcaatctacaacctgcaatctaaaatctacaatatctttacgcgtctaattctcctgcaattacatttaaactggatagaataacaattgcatccgaaagtaaagatcctttaatcatatccggataagcctggtaataaataaaacaaggtcttctgaaatgtaatcggtatggcgttcggcttccgtctgtaaccaaatagaatcctatttctccatttcctccttcaaccgggtggtaaatttctgcaaccggtacaggaacttctcccattacaatcttaaagtgataaattaaagattccatcgaagtgtaaacatcttcttttggaggaaggtagtaatccggaacttctgcatggtattcgtttcctgccggcattttagccaaagcctgacgaataatgcttaaactctcccaaacttcagcattacgaacacagaaacgatcataagtatcacctgattttccaacaggaacaacaaaatcaaaatcttcgtaagaggagtaaggttgtgctacacgaacgtcataatcaactcctgcagcgcgtaagtttggaccagtaaatccgtaagccattgcctgttctgctgagatagcaccaacgtttacggttctgtcaaggaaaattctgtttctttcgaataagttaacaaactcttgccaggcaacagggaattcttctaaaaagacgtctagtttgcggaaagcttcaggcgaccagtctctttcgaaaccaccaattcttcccatattggttgttaaacgagctccacaaatttcttcgtaaatctcataaactttttctctaaattgaaaaacgtacaagaaaccagtataagcaccagtatctacacccaggatcgagttacagattaagtgatctgtaatacgggccagctccattacaattactctaaggtattgtgctcttttgggaacttcaatgtttagtaatttttctaaagtcatccaccatcccatattgttaataggagaggagcaatagttcatacggtcagtaagaggagtaatctggtaaaaagggcgattttcagcaattttttcgaaagctctgtggatgtaaccgattgttggttcagcctcaagaattctttcaccatccatcaacaggatattttgaaaaataccgtgagtcgccgggtgtgtaggacctaaattaagtactgaaagttcacttccgtcttcgtttagtttgtccttaattattttagcatatcgatgctctggtgataataatagttctgacattttataatgttgaattatttatttttagcaatttgttgttgttcttccaaagaatctgtcgtctttatcagttcttccgctgtcttccattgggaattcttttcgcattgggaaagacaccatttcgtccatattcaaaatacgtttcaattgtgggtgtccaataaaattgactccgaagaaatcgtatgtttctctttccatccagttcgaactcaagaaaatatttgaaatggttttgatttccggtttttcaccgtttaaatatactttgattcgaatacgtttgttttcgtaccagttgtgcaagtgataaacgatggcatactgacgatccgtttcgttgtccggataatgaacaccgcataaatcggttagaaagtggaagcgtaaatcggaatcgttttttaaaaatagaatcagggctgtgattttatcagcggtagtttccaatgaaaaaatatctctttcctgttgaaagttaaaaacacttgtatcaaatgtttctgtaagtttatcttggatcagggtattttctaaagccatcttaagtaatattatatgaagctagtaattcttggtattcaggagagcttctgcgccttacagattcgctttttactaattcctgaagtttcattactccgtcaacaatttgttcaggtcttggaggacatcccggtacataaacgtcaaccggaattactttgtcaattccttgtagaacagaataagtatcgaagattccgcctgatgaagcacatgctccaacagcaattacccagcgaggttcagacatttgttcgtaaacttgtcttaaaataggcgccattttttttgaaatagttcccattaccaaaagcatgtctgcctgacgaggagagaaactcacacgctcagaaccaaatcgtgctaaatcgtaatgtgaagccattgttgccatgaattcgataccacagcatgaggttgcaaaaggtagtggccatagtgaattggctcttgccaaacctacaacatcatttagttttgtggcgaagaaaccttcaccagtaactccctccggcggcgcaaccatatttacatttgaatcgctcattttttattttagattttagattttagattttagatttttaattctgaaaccgaaatcaatattttaaaaatcaatattgtgttttgagaagttatctttcaaatctaaaattttaaatcaggtaatctaaaatctaaaatctgaaatctaaaatcgcaattattcccagtctaaagctttctttttgatgatataaaagaaacccactaaaagaagcgacatgaaaacaatcattttaagcattccttctacgcctagttctttgaagtttactgcccatgggtaaaggaaaattacctctacgtcaaacagtacaaataaaatggctaccaggaagtattttacagaaaaaggaatacgtgcgtttccaacagattcgataccacattcgaagtttttatcttttacttcagaacttctttttggacctaattttccggaaataacgatggttcctgcgacaaaacccacagccaaaatgaactgcattaaaataggaatgtaactgtattgatcagattgcataaacttagcttttttacttaaagaataagccacaaagataactttcaactctgtaaatcacaagctaaaaaatgatttaagtgtgccctgaaaccgggttaacagctaatttttattgattataaataagatccaaggattttagtatttttttaagatttgggtaaaaaaaaacgtcccgatacttcgggacgttttgaaaaccattcagaggcaaaaaaaataaattgctatatttttcttagattactgctactttagcagcaactttcccttttcttccttcttcttcttcgtagcttacacggtctccttcgcgtaattcttccgcgttaattcctgaagcgtgaacgaagatgtcttttcctgtttcttcgtctgtaatgaatccataacctttagactcattgaaaaattttactgtacctgtacgcattgtaattgtaataataatttataataaagcaaatgtaatatataaattcatacaaaagacatatacctgttaaatttttgtaaaaattattgattaacagtcttttcgctatttatattgcatcaaatttggtatgtgtatactttatttgagaatcattaattattataattaaatgttaaaaaagtagcttatgttttacaaaaattttgtatattaagcggagtttgttttttttagacttgtttttgtgggaaaaagcctgtgtttactagggttttattttgtgttttaagattttattaacacgaaaaaagggcgaaatgacgtcaaaatgcataaaaaaacgacaactgaaacttttagttgtcgttttttattttctaaaaaagagaataagaaattatttcaaatctaattttatagcaagttctttcaattgtgcttcatcaatagctgcaggagcatcgatcatcacatcacgtcccgaattgttttttgggaatgcaataaagtctctgatggtttcctgacctcctaaaatggctactaaacggtctaatccaaaggctaaacctccgtgtggtggtgctccaaactggaaggcgtccattaagaaaccaaactgtgctttagcttcctcttcagtaaagcctaaatatttgaacattaattgctgtgttgctttatcgtgaatacgaatcgagcctccgccaatttcatttccgtttaacaccatatcgtaagcgtttgcgcgaactttccctggttctgtttccagcagttgcatgtcttccggttttggagaggtaaacgggtggtgcattgcgtggtaacgccctgattcttcgtctaattccaatagtggaaaatcaattacccataatggtgcaaattcttccggattacgcaagcctaaacgggttgcaagttccatacgaagtgcggaaagctgtgcacgggttttattggcaggtcctgaaagaacaaaaatcatatctcccggttttgctcctgtgatttttgcccattggcctaaatcatcctgatcgtaaaatttatctacagaagatttgtaagttccgtcgtcgttgcatttggcatacaccattcctgatgctccaacctgagggcgttttacccagtcaattaaggcatcgatttctttacgggtatagtttcctgctccaggaacggcaatacctactactaattctgcagcgttgaataccggaaattctttgtgttgcgcaaattcgtttaattcaccaaattccattccgaaacgaatgtccggtttgtcatttccatatgttttcatagcatagtcgtaggtaattcttgggaatttgtctacgtcaatgcctttgatttcttttaataaatgtctggtcagtccttcaaaaacatttaagatgtcttcctgctctacaaaggccatttcgcagtcgatttgtgtaaactcaggctgacggtccgcacgtaaatcctcgtcacggaaacattttacaatctgaaaatatttatccattccacccaccatcaataattgtttgaaggtttgaggtgattgtggcaaggcataaaattgtccttcgttcatgcggcttggtacaacgaaatctcgtgctccttccggagtcgatttgataagatatggagtttctacttcgcagaaatctaagtccgataaatatttacgaacttccatagctactttatgacggaacaataaactgttttttacaggatttcttctgatgtctaagtaacggtatttcattcggatatcttcaccaccatccgtttcgtcttcgattgtgaagggaggtgttaaagcggcattcagaatagttagttccgatactaaaatttcgatttcaccggttggaatatttttgttcttggcttcacgctcaattacggttccttttacctgaattacaaattctcttcccaaggttttggcaagttcaaaaactgctttatccgtgcggctttcgtcaaaaataagttgtgtaattccataacggtcacgtaaatcaacccaattcataaatcctttatcgcgtgatttttgaacccaacccgctagtgtaacttccgtgttaatatttgaggcgtttaattcgccacaattatgacttctatacatgatcaaaattttagactgcaaaagtaaacacaaaattcaaattaatatagtaaagtgatgacttgatgcttagaaatttgaaatattttgttaattcttaaatttcgagaggctaatttcgttagatttggattacaaaatctaaactccaattgatatgaacaaatttttaataaccggtttgttgatttgcagcaccttgggtgtgatcggtcagaccaagagcccgattaaattcacagctaagattacgaaccgaaacagtgatactttagtaattaaaggaaaagataatttcaaacaggtgattccaattaataaaaagggaatttttgtggcttcttttgatgctccaaagggtttttatatgttttcggatggaacggaaggttctaatttgtatttaaaacccaattctgatgttaatttgacaatggacgccaaggagtttgacgaaacgattgtgtacaaaggaaaaggggttggcgaaagtaattttctggctcagcaggctttaaatgatgaaaagtttcagaaggaagcttttgttaaggaagctacggagtttgcatcgctattggaagcaaagctgaaaacggatctggcaagtttagagaaaggtaatttcgacgctgaatttacgacggctttgaaaaagaaatttgaaagttttaatcgttacgctaaagatgactatgagagtgctgcaaaagccaataagatgacaggaactttatctcctgattttgattacgaaaatcataaaggtggaaaaacgaagctttctgatttaaaaggaaagtacgtttatattgatctttgggctacctggtgtgcgccatgcagagctgagattccgtatttacaaaaactggaagaaaagtatcatggaaaaaatatcgagttcgtgagtgtatctgtggataaagcgaaggataatgaaaaatggaagaagtttgtgacggataagaagcttggagggattcaattgtttgcggataaagactgggaatcagagtttgtaacgagctatggtgttaccggaattccaagatttattattgtggatccaagcggtaaagtagtgagcagtgatgcagaaagaccttcatctccagagcttcagacgcaattagatgcgttattaaagtaacttacgtttcaaattacaagtttataaaagttttatatttttttaggaaatagcagtaaaaccaaggcttaagctttggtttttttgtttttgaaaaatttccaatgttaagtttttatccaatgttaccaaattgttaagtaaaagtttttttaatgtaaacaattgattatatttgataaagatttgataacattaatacctaaagatatgaaaaagtgtgtaattttagttgcaatattgttctctggaattttagttgcacaagagataaaaccggaattggaagctgttggaaatagagtaaaagctacgtattactatgaaaatggtagtgttcaacaagaaggtttcttcaaagacggtaagttagatggtgtttgggtatcttatgatacaaaaggaaataagatggctgttggagaatacactgaaggagtaaaaaccggaaaatggattttcttcaatgacaaaaatctttgcgaagtagcgtatgaaaacagcaaagtaacatctgttaagaatttacagaaaaatgctttagccaatagaaattaaaaagatttcgaatgatttatagaaccgtctcgttttttaacgagacggtttttttatgcctttgtatttcggtattttagttttttcgggtcaggtgcaaaagttgggagtattgctctgaaagagcttaaccaatagaatggtgcgcagcactatgagtaatgatagcgaatatcggttacgccctgaaagggcagaagcttacacgtaaaaagttgattttattctattttgaattatattttataaaagagcggtttggtctttattgaaaattgtaaggtataagtttgcttttgccctttcagggcaattctacaccttagtctaattcatagtgctgcgcacgatgttgttgcttttcaggctttcagcctttttcttcccgacttttgttcttgatcctttttttacgcagattgcttcgccaattcgctttcgctcgggttagctgattgtgctgattttttttatgctctgctttttttagattttttatttcttccgtaccaaatgataaaaccggttaaaggaagtgcggctgcaattaagcttacgataaaggccataatttttccgggcaggtttaagatttgtccggtatggatgccataattcatttcgacaacctgtaaacccagcgttttcttttggaacggttcgctttgaatcagttttccagtgtgaggatgaaaataatagttgctttgatggtcgtatcgtaaagcatgcggataagctcctgtttcgatgatattacctttttgctgtggaaaggtaacaaaatacatttcggcatcgggttgaagttttgcggttgttgtaaaagcgcgatcgacagcagtaacggagttgctgttgaattttgtcgtatcgatgacaggtacttttatttccagcgttttatctcccccaaaattgaacgtactatagattccgtcacctacccactcgtaggtgaaagttaaaccggttatggcaataattacggcaagaatcgaaatataaaatccggaagtattgtgccagtcataattgacacgtctccatttagcggaccattttacagtaaagcttcgtttgagatcgctttttcgtttgggccaccattgaatgagtcctgaaattactaataaaatgaagatgatggttgcgcttccaatgatatgttttcctatataatccggtaagagtaaatacaaatgaatgcgttcgacaataataaaaaagtcggtatcgggatcttcggttttcaggtattttcctgtgtagggattgaagtagaggtatcgattttcgctatcagcataggtgtaaacaattgcagaacggttttttccgtaatacgaaaccatacttgagttgtaatttggtagaatctctttggctttttccttcaatacagaaggtagaacaaaaggtttgctctgaggttcaacgattcgccattctttacgggtgatgtcttttatttcatcatggaaacaaaaaatacaaccggtaatactgataataaaaacaataagcccggaaattaatccgagccatttgtgcagaaatcgtatttgtgttttgaatcccattttattgtaaaaacgcaaaattatacgcaaaatcaatggggagcaagtaattttatttattttttagaaacggcttcgtttttaggttgtaatgaacaggcgacataaagagttatggaagccaggaatatccaaaaaatatccacaaagaagacttgagttttattttgcatgaaagaggtccaaaaccaatttccggagacaattccgtttgtaattggaattaaaaaacctaatatacttcctgaaattaagcagtatttgttggtaaaagcgtcattttttttaaggatgaaaaacacggtaagaataagccatcctataaagtaaaccatgtataactgatcctgagtgagagggtggaatattttggccgcaataaaagcaaaggccgtgatcgggtacatgctcaggcatatggctaggtagattctaacaactccggcattaaaacgtcttttcttttcgggtaagttgtttttttgtctggcgactaaccaaatcataacgcccgaaatgatgacaaaacaggtaattatacctagaacgaaacttacaattttgagagcataacctccataatcaccaaaatgtatgcgatacagaacgttttttaccacgtcgagatagttgttttgagtaatcggattttttcgggccatttcttttccgtccgcaattcgatagacaatcttcccaattccggtgaattttttatgacttaacatttggccttcgactaaaacgtgcatgttggcatctccataattctgaatgaaaacacgagtgatttcaaaatctttccagctgttttttgtttgagcaacaagctgatcgatattaaatggtgctgctaatttcttattgtcgaatttgtattcaggatccttatattccagttctttgtataatttgtcctgatcgcctttgtataaagccattactgccggagccacaattaagagtttaatcatgaaaaaagttccggttacagcatatacaaattgaaaaggcaatccaatcattcctaaggcggtgtgagcatctgtccataaggtttttagtttttcttttggacggaagatgtagaagttggaaacgatttttttccaatgcagtaaaagcccggttacgatggcaaataaaaaaaacaaggcggtgaaacccgaaaggtaataaccggcaggataaggaatttgtgccaggaaatgcaagcggtataaaaattctcctaaagaataagaatcttcgtaagtaaaggttttgaaggttttggtgtcaaggtagaaaaacgatccttcttgttgttttttaggggccagggtatcttttgtaccctccatataaacagctactcttcgttccgtacttggtttcgaaatggtaatgtttcttccgtgtaagacgtattctttgtccagtttttgtaaagctgaagtatagtcgagctggatttctttggttaaggcagtagattcatttctttcccaattgataatttcatctctgaagaaagaaaaggatcctgcgaaaaaaatcacaaaaagtactacgctaatcacaattccgctaacggtatgagtatgaaaatagatgttgtaattacgattgttcatggattattttgctattggattgtaggtttgacccaggtatattaaaagagagaaaattaaagtaataaggatgtagatgccccatattttccatccgcttttggccagaaaggcaacgaccatcagggctacccagaggatgaatccgctaaaagccatggtcatcagtatatcggcacgactgaaccaggctgctaaagccaaatgaaaggtgactgaaacaaaatagccgcctaatatagcagctgtaattttggcaaatctttgccatttggattgggttaaatattttggattggccggcatattttaagtagaaatgaattagtagtagtaaaattccagtagcgctgcaagtataaaaaaaacaagaatagcatagcggcttattttttttagaggagccagaatgatgatcagacttccaatggtcatgagctgaataaagaacattagggttccgcagcacaaggactgtgtaagcagccagagcacataagccagtaaaagaagtcccaggcctaaaaacttagttggtttaggattgcttttcatccatttttcgaaacctaaatcatgcgataatgtggctcttttcgaggtgtagtacagcgtgtaaaaagctaaaaaaacaataagacttgcaattgtgatcatgattgacgaaatttaaaaaacacctttcccgtaaagaaaggtgtttttttgatttttattagaatttataagcgaaacttgccgctacacttctcatatttctgggatgaatcgtagaccatccatcataagtatctgcatttgcaatgttatccatctttaaggttaaagtgaatttctctgcagcatagaaaatagaagagtttaatacggtatattcaggaatcgtaaacgctccggtcgtttttctgttcatgattttgttatcacccacataatttcctccaaaacctaatccgaaaccttgtagcggtccttccaaaaatttgtagctggcccaaagattcgctaaatttcttgctcctgcgctttccggtctgaagtttacaaattcaggatcacctgccgtaagtactgcatcattatagctgtatccaaatacaatatttaaaccggcaacagggttagaaacgatttcagcttcgaaacctttgtttctctggcctccattttggtaagaagtagagtttgtagcatcggttctgatgctgtaaacctgatcggtaactttgatatcatagtaactgaaagtggcgtaaagtttgtctttgaaaagattcagtttggtaccaacttcaaattgattagcatgttccgggttgtaaattcttggagttcccacacctgcaatcaggtcttctccgggagcaacgtttgaaaatccatccatataattggcaaaaacagaaactttatccaaaatcggctgatacactaatccgaatttaggagaaaaagcagtttgattgtatcctccgttgtcggcgttcataaaacggtctacacgtacacttgccatggctgacaatgcaggggtaaaattgatgacatccgaaacataaacactgtatacttcctgttttgttttgttgttgtttgtttttgcttttgctaaaagagcatcagttccggctttggataaatttccgttatcaccggttgtaatgtattttgcaggatcggtaattttgaagacctcttcgttaacccttttcaaactggcattaccaatgtatacatctccatttgcaacatatccggtactgttgtttatcaatgaggtgttgaagtagtcaaaacctgcaacaattctgtttcttaaggttcctattttaaaatcgcctatgaaattctgttgaatatcagtagttaaagttgtcgaattttgatagtttaaagaacgacccaatactattccttcggaaatagtgggtattgatttcgttttttcgtacagataggtgtagtagccttcagactttgttgatcctctggaaaccactgtttgagaagtccattcgttattaaacttgtaaatcatctgtccttgcagattgtatgaaggtgtttctatagtaagctggttactggtataagaacgtttgttgtcatagcccagttctttcatattgtgaactcttaaagcagtacctctgtctaaaaacaacatggttggattggtcgctttattgttcatgaattcagtattaacaaagaatgaaagtttatcgtttacttcgtaagacagagaaggggcaaaaaagaatgattttttaaatcctgcatcctgaaaactattttcagtgtgataagcagaattgatgcgcaggtttattttgtgctcgtcgtctaatggggtgttaacgtcggcagtaactctgtttaatccgtaacttgcagtagtgtagcttatttctcctccgaaatgatcgtaaggtcttttggttgtaatattgattaatcctccgtaggaaataaggctgcttccaaacaaggttcctgatggtcctttgattacttcgattctgtcgatattggcaggatcaagacttccgtttgttagtcccggcaatccgttaatcatagtaggctgaacagcaaaacctcttagagaaaagtagcctgcaccatcatttccacgtcctgtagaagcccaaagggtggttaatcccggagcgtttttaagagcgtcttcgatattggttacgacttgttcttttaacaattcgcctgtaatagtagaataaacttgcgggttttcaagatttttaagaggtaatcttgatacttgctggttttctttgcgggctaatggattcttttttccgtgaccgttgattacaatttcgtccagttgttcagaattggaactgatcgtgaaatcttcaattatttcgtctccgccattaagagagacacttttttcttttgaagaatgcccaaccgcagaaactttaatcacatagcttcccggtttgatgtttttaatttcgtaaaaacctctgctgtctgtattggttcctattttggtcccttttaagataatggtcacattatctgcggcctgattgttactaaggctaatttgtccttttatgcttgctctttgctgtgcccaaatggttggagttgcaagcagtgcaaagagaaaagccaaaaatgttgttgtgtatttggttttcattattatttagaattgattttaatagtgcaaatttaagtgcagaatacaaatcaaacaaactattcttatttattctaaataaactaatttttaaaaggcaaaactttttattgtgcaattttttaacattttaagcggattttaagtcaatattaagaaaaaaaacctgcttcagttaagaagcaggttttgtatgattgttgaaaagtattacaattacaattctaaagcgcgtttagcatctccattcattaataactctaatggattttctagggcttcttttacagctactaagaaaccaactgactcacgtccgtcgatgattctgtggtcgtaagaaagtgcaacgtacatcattgggtgaatttccactttaccgtttacagcaattggacgctcgatgatgttgtgcattcctaagattcctgactgaggagggttgatgattggagtactcaacatacttccgaaaactccaccgttagtaatagtgaaagttcctcctgtcatgtcgtcaacggtaatttgaccgtcacgtgctctaagcgctaatcttttgatttcagcctcgattccacggaaagttaataattcagcgttacgaactactggtaccattaatccttttggtcctgaaactgcgattgagatgtcggcaaaatcgtaagcaattttgtagtcaccatccatcatagagttaacatcagggtataattctaaagctcttgtaactgcttttgtaaagaatgacatgaatcctaaacctaaaccaccatgttttgctttgaaagcatctttgtattcgttacgaatttggttgattggtgtcatgtttacttcgttgaaagtagtaagcatagctgtttcgtttttagccgaaactaatctctctgctactttacgacgcaacatagataattttgtacgctcagttccacggcttcctcctgttggagttcccattgaaggtacagcgtttacagcgtcatctttagtgattcttccacctttaccagttcctgaaactgaagccggagcaatgtttttctcgtctaatatttttcttgctgccggagatggagttcctgctgcgtaacttgttgctgccggagcctgaaccggagcagcttttggtgcttcagcttttacttccgcttttggtgcttctgcctttggagcttcagcggccggcgcagatcctgatggtttagctgcgtcagtatcgattaaacaaactacagcacctaccgctactgtatcaccttcttccgctttaagcgtaataactccgctcatttcagcaggaagttcaagagtagctttgtctgaatcaacttcagcaatagcctgatctttttctacataatcgccgtcttttactaaccaagttgcgatttcaacttcttttatagattcccctggtgaagggactttcatttctagaatcatcttatttctttgtttaaagtttattttgtttaaagtttcaggttttgtaggggcccgaaactttaaacttgaaacattgttttttatctgaataaatttttatcgaataccattctgatagcatcggcgtgacgacgttttgaacgtgtgtaacttcctgatgccggagcagagtaagcttttaatgaagctaatctccatttcacaaggtcaaagttcatcaacataaagctgtaagctcccatgtttttaggctcttcctgtgcccaaacgtaatcgtcagcatttggatattgtgcgatgatttctttgatttgctctacagggaaagggaataattgctcgatacgaaccactgcaacgtcatttcttccattgttttctctttcagcgacaatgtcgtagtagaatttaccggtacagaatactaaagattttacgtcttttttgtttactgtagtatcgtcgattgtttcctggaagcttccgtttgctaattcctcaacagtagatacgcatcttggatcacgtaataaactttttggagagaaaactaccaatggtttacggaatttcgttttcatttgtcttctgatcaagtggaagaagttagccggtgttgtacaatcggcaacatacatattgtgtcttgcacaaagttgtaagtaacgttccattcttgcagaagagtgttcagctccctgaccttcatatccgtgaggcaataataaaacaataccgttttggttgttccatttgtcttctccacaagaaatatactggtcaatcatgatttgggctccgttagagaaatctccaaactgtgcttcccaaatagttaaagcatttggattcgctaaggcatatccataatcaaaaccaagaacaccatattcagataaaagcgagttgaaaacaccgaattttccttttttgttcgctatagtgtccagtaaaataacttcttcttcagaatcttccactttaactaccgcatgacggtgagagaatgtaccacgctctacgtcctgaccggaaatacgaatgtcaaatccttctgttaaaagtgaaccgtaagccaatgcttccgcagttccccaatccaaagtgttgttgtcgtatccaacttttctgtcagtaacaattttagtgatcttgttgatgaatttcttgtctgccggtaatgtcgagattgtattgatgatagaatccagttccttcttgtcaaaagtagtatctgttttttctaacatttgcgtatcggttacctgaacaaatccattccattcgttttgcatgaatggagttataatcgtcaaatcttttttacgggaagcttctaagttttcctctaaagcagatttgtattctttttctaaagcatttacataagaagcatcgattatgccgtcagacaataatttctctgcataaatatctcttggatttttatgtttagcgatgattttatataaaactggttgtgtaaaacgaggctcatcaccttcgttatgaccgtattttctgtatcctaataagtcaataaatacgtcacgtccaaactgcattctataatctaatgcaaaagatacggcatgtacaacagcttcagcatcatcggcatttacgtgtaataccggtgaaagtgttactttggcaacatctgtacagtacgtagacgaacgtgcatctaaatagttagtggtaaaaccaacctgattgttgataacgatatgaattgtaccacctgttttgtaaccgtcaagttgagccatttgaatgatctcatacaagattccctgacctgcgattgcagcatctccgtgaacggcaataggtaatactttagagaaatcgttaggataatatttgtcctgttttgctcttgtgattccttcaattacagctccaaccgtttctaagtgagaagggtttggtgctaaattgatattgatgttttttcctgttcttgtttttttgtcggcagtaagacctaagtggtattttacgtcaccgtcaaaatattcctgatcgtaatctttaccgtcaaactcaccaaaaatatcctgagttgattttccgaagatgttagccaaaacgttcaaacgaccacggtgagccattcccattacgaattgttcaacacctttttcggcagcctgctcgatcaaagcgtccaaagccgggatgatagattctccaccttctaatgagaaacgtttttgtcctacatatttagtatgcaggaagttctcgaaagatacggcctggtttaatttatttaagattgttttcttttcgtcagaagagaagtttggctggtttacgtttacagccagtttgtcctggatccattttacaacgccgggatttctgatgtacatgtattcgataccaatgtgctggcagtaaatagtctgaagacgtgtaacaatatcctgtagtgtagaaggcgctactccgattgcctgagcagcatcaaaaactgttgaaagatcagcagttgttaatccgaaattttcaatgtctaaagttggagacgatgttctgcgatcacgaactgggtttgttttagtaaacaagtgcccgcgagtacggtaagcatcgattaattttaggacattgaattctttttgtaatttatcagaaactaaactacaatctacgttgtcgtttgttacgtattcaacgattcgttgaaccggattttcgtcattataagtcgtttgtccaaaatcgaaaccttgaaaaaaacttctccagcttggctcaacgctatctgggtttactaaatactgatcatataattgtgcgaaaaactctgtatgcgctgcatttaaaaatgaaaacctatccataatatgagtgaatatactttttgttaaatagaatcgcaaaagtacaacaatcacatttatttaaatcttttttttacgtacttttacgtaaaaatttgttaaaaatagactctactatggataaaaatcaaatttcaatcgttttcaaaactttttttgtgattttggctgtctcattttcgagttctgcttttgcacaacaaaaatatgtcatagacaacagcaatcatttttgggagaaagttcagtttggaggaggtcttggtttaggaattggttccggatatacggacatttcggtttcaccaagtgctatttataatgtaaacgaaattgtagcggttggtgttggattgcagtttggttatttgtcttctaaaaattattatagttcttttgtttatggtggaagcctggttggactcgtgaatccgattcctgaaattcagctgtcagcagaattggaacaggttcgtatcaatacagactataaatcaacggcctatcgaccaagttactctgatgattattggaataccgccttgtacctcggtgcgggttaccgaaccggaagtgttactattggagcacgttatgatgttttgtatgataaaaatacaagtctttacggatcaggatttatgccttttgtgagagtttatttttagaggtgctgagatgctaagatgctaagtttttaattcattatcataattacagttcttaaatgaaaaaatattttgctcttctttttggaattcttcttggaagttcgtcctgtcaacaaaaggaaacaaaaaacgttgatgttaaaaaacaagctcaaatagatgcaaatcttggagtgataaattctttgagtaatgctggtgataagctaactgcttcaagagaagtttttcactggatttatttcaaagatgaaaaacaaagaaataattatttgacagaagttagtaagaaaggatttgaactagtgagttcagataaaattaatgatgagtttccatatcaattacaaataaaaaggattgacaaagttgatgaaaatagtgtaaatgattatgtaatctatctatgggaaagggcaattgaatataatggagattacgatggatgggaaacaagtatagaaaaaacttagaatctcagaaacttagagcctcagcaccttagtatctcagtaccttagcccctctacttataataatttcggaaccaaaccttctgccattctctttttaaaatcaaaaaggaaacctgctcggctaagattaccaaatcagaaccgtcgagttttttgatttcatcttcagaaacatcgatgatataaagcagattgaggtactccgcaaatttgtactgaatcattctatagattttctcgtgaagttgaatttttagttcttcgggagaaatgctcattggaaaatctattccttcgttggccaaattaaagtctttgttaatttgctcaatcaaacttaaatatagattttcgctttcggcatcagccaataaaatgtcggtatttgcagggattggaaacattgaggctttttaagaattgacgcaaagttaaaactaaaaaatcattttacggttgattctctttcaatgattcttgtaggaagttcaataatttgatgcgtcaccggccgatgctctttcaggtcggcaatttcatcgattaaaagcgaaacggcctgatggcccatttcaaagccgggctggtcaattgtggttaatttaggtgagataaccgtgctcataaaccagttgctgaatccaaaaaccgctacctgttccggtgttttgattcccgcctcattaaaatatttgataattccgatagcgaccagatcagtgatggcaaaaatcgcgtctatgtccgggtgctccgtcattattttctgagcattttcgtaaccatcctcaaaatcggtattattgtcacatacataaaccagtttggaatcgtattcaatcccatgtgcttccaaagctcttttgtatcctaagaatctgtcgatggagttttgaggaacataagaacctctaaaatgtgcgatctttttgaatcctttattaataagataggaaacggcatcgaatgccgctttagcatcattgatcacgactttggaacaatcgactcttttggcaattttatcaaataaaacaacgggcgtgtttttgcggatcgcttcattaatatgagtaaaatcatctgtttcattagagagtgacattaaaaccccgtcaactcgtttttgaattaataaggccagctgttttttctccagttcgtatttttcgttggattgtaatataatgacaagatatcctcttttttcggcttcttcgagaataccatttaagacactggagaagaaatgatgcacggtagccggaatgattacacctattgttttggtttcgttggttcttaggtttaccgcgaccgaattgggcatgtaattcatggtttcggccatttcgatcacgcgggcacgtgtagacttactaatatcggtatagccttttaatgcctttgaaaccgtggtaaccgaaattcccaatgccgaggctatatctattaatttggtgtcattcatgaaataaaagtactaaaaaataaagtgtattgataaaaaaataacttccgaaaacgttttaggggatttcgaaaacgttttcgatttagaattcttaaattagagttaattccttgagtaagtttacatttcataaatgaaagatttactaactaaaccaaaaaaacatgaaacagcaacattcttatttaagcatagtatttctgatatggtgcttaatctctgttccgaaccatttgtttgcacagcataaaaataccgtttccggaaaagtactcgatgagagcggacaaacgattccgggagccaatgtttcgcttaaaggaacagataaaaatacgattacagatgaaaacggaaggttcgtattttccaatattcccgcaggagattataccattgtagcgaccaatgtggggtgtaaaacctttggaaaacaaatcactgtaaaagaaggagaatctctagaggttagtttacttctggaaggggaatcacaaagtttgaaagaagtggtcgtaacaggatcttcaagtccgaggtctaaattagaatccagtgtggccattaccaccatgggagctaaggctatcgaagacagggcaccggcaagtacagctgctttattgcaaacgattcccggatttgtggtagaagcttcagggggagaaattggaaacaacctttttgcaagaggaattccgtctgccggagcctatgagtatgtacagattcaggaagacggattgccggtttttgaagatggcgcgctgcaatttgcgaatgctgatactttttacagattagacgaaaccgtgagcaaaatggaagcagttcgcgggggctcagcatctatttttgctaataatgcgccgggaggaatcatcaattttatttcgaagacaggacagaatgactttcagggaagagctaaattctcgacttcagattacggaatgttccgtaccgaccttaatttatcgggggctttaattcaggacaaattgttctttaacgttggaggtttttacagagccgataatggggtaagaaataccggttttactgctaataaaggagggcagatcaaaggaaatattacttataaatttgatgataacgattatttgagaattaacttcaaacatctggatgacagaaatgcgttctatttaccgattccattaaaaagtaataatggtaaaatagaaggaattccgggctttaatccaaattacggaaccttgacgtcagtaaattttagccgtttaaatgtaccgcaatacggtgggggaacttttacggcagatttggaagatggatctcatccgatcatcaactcgatcggtgcggaatttaaaaagaagatatcggagaaagtgacgtttaagaatgccttcaaacaaaccaatatcaatttgaattacaatgctatttttccaaatggaggtccgtggacacaagatgcttatgcaacaggggttcagaataccacggccagtaacctgacctattcttatgtcgataatggagcaactcttgatccgaatgccttaattatgagagcagatctttggcacatcgagaaaaagatgaacaattttgcgaacaatttctcttttgcgtttgatttagatcctgtaaaactgactgcgggttactattattccaactggaaatcgaatcaatactggaattggaactcgtatttagtgggagtttcagacaatccgagattgttaaatgtaaaagacaatacatcaggcgtaaatcatacctggaatggggtggaaagaattacttggttagaaagagatgcccaaaccaaaggggttttgaatgatgtttatgccgatgctgaaatcaaagcgacagacaagctgactttcaatgccggtttacgatacaataaagacaagtattcagggtaccgagacaatgcgagattttttgcagagaacctggggattttaaacaacaatacggccgatgataaggtaacaacggtaaaaggaaatccgtatacgtactggcgatatgatgtgagcgaatggtcgtataccgctgccggaaactacaaattcaatgacaatatggcttcgtatgtacgttacagccacggtttcagatcgcctattgaagagtccttttatgataatgcagccgatttgagcaagctggaaaacaccgaggtaaatcagtttgagttggggtataaatattctaattctttcttcaatgtaaatgccaacttgtttcacatgggcttaaaaaatgttgcctttacggatattttatcggatggatcttctgagaataaatttgccgatgtaaacaatattggtcttgaagtagaaacgaatgccagatataaaatggtaaaaatgaactttacgtttacggttcaaaaaccggagtatgataattttacgggtaccaatgctgacggatcgacttttaattttaacggaaacacagccagaagaatccctaagtttttctgtaacttaagaccggaagtggatattacaaaagattttacagcttatgtgcagttctcttattatgataaaaaattcacgaatcaggacaataaacaagttttgccggcttataaagaagtaggggcgggattaaattatacctatcataatcttcgttttgcggttgatgcttcaaacttgttcaatgaaataggtttaaccgaaggtgatccaagacaaactacgtcagccgcaagtgatgtgtttatggcaagaccaattttaggacgcgcctttagattttcggtggcgattaatttttaagagattgtgaaatgtgagatgtagagtatgttcgaaacctgaaacctgaaacctgaaacatttcaactattaaacgacaaaccaataaaaaatgaaaaacataggaattaaaatctctctttacctcaattattttgtcttcgctattctcctgaatagcgtaggcattgtgattttgaaatcgcagaaaaattatggagtagatgaagttcaggcgagtattttagaagcgtttaaggacatgcctattgcgattgtttccttttttatagcctcttttttgcccagaatcggctatcgaaaatccatgctgattggtttgggtttggttactctggcttgtatttccatgtattttggaaattcatttgacaatgctaaaattctttttgcaaccgttggagtttcgtttgccttgattaaagtttcggtttattccttaattggtactgttaccgaaaccaaaaaagaacacaatgccttgatgagcagtattgaaggtttttttatggttggaattgcactggcttattttctgtttccggcttttaataaggaagaggatcccaattcgtggctaaatgtgtattggtttcttgccggattgtcgttgctgtcgtttctgtttttgtgctttgtgaagtttgaagaaaccgaagtcgccgcaggagcaaatctcaaagacgatttcatgcaaatgttccgtttaatggcgaaattgctaacggttgtttttgtaatcagtgtctttttgtttgtaatgattgaacagggaatcctttcctggttgcctacattcaatacaaaagtgctgcatttgcctgaaaatataagcattatgatggctagtattttggccatttcactggcagccggaaggatgattgccggaattgtaactaaaaaagtgggctggctctgggtgctaagtttctgtattctttcagccatgctgattgtagtttttgtacttccaaaaaccgttggattggaagtgaaaagcatcaataccctggcagacatacctttaattggtttcgcatttcctttaattggactgtttattgcaccaatttatccgttgttaaattcgattgtattgagtgcgctgcctaaaaatctgcaaagttcgatgacaggattaattgtgattttttcggctcttggcggaacattaggctccagaataacaggctggctgtttaaaaatgaaggaccggaaaaggcattttattttacattaattccaatgtctttattattagtgtctttttttattcttaaaaaaataactgcaaaagatgaaatttaaactacatatatcccaaactatcgaaaaactattggctcaggaagatactgacggcgataaaaaaataacgattgatgatcatggtccgaagcgatttttactgaatggtgaagagggaaattcaatccttattgaaggaacctaccagctttcaaacttattgcaggaactggctttggctaaaaaagaaaatacggaatttgccgaaatcagtctcgatcaaattgtagaggatcctgtaaaaagaatctccggaaaaataaaaaacctgtattggaaagggttaacacgtacgattgatgccaatggggtgaaaaaaatactggaagacaataaaatagaaaatgctatttcgtatttgtatgttccttttggagatgaaatcgtttttgattatttcaaaaaactggaagccgtaactccaaagttaaaagtggtacaaatgccgaaacatatttcaccggagtatgtcatgtcgctcaatcaaaagccgggcatattggctttggcacttcaaattaaaaacaatgaaatttcgggagttccctttgtagttcccggcggaaggtttaatgaaatgtatggctgggacagttattttattgccaaaggacttttaatagatgataaaatagagctagctctgggaattgcagagaattttaaataccagattgatcattacggaaaaatactaaatgcgaaccggagttattatttaacccgtacgcagcctccgctttatacgtcattgattatcgatgttttggaaaaatcgaatccggatattttctggatcgaaagacatttaaaaacggccattaaagaatatctgacggtttggatggaagaaggcaaaagactaaccgctaatgggttgaataggtataaagctgaaggaattggactgccatttgaagtagaggaggggcattttgatgatattctggagcaatacgcaccaaaatacaatttgtctacccgcgaattcgaaaaaaaatatctggaaagagaagtggtcgatgctgaactggataagtattttattcacgaccgaagcatgcgcgaaagcggtcatgacacgaccaacagactggttggaatttgtgccaatttaaataccgttgcgataaatagtctgctttacaaatacgaaacggatattgcctttttgattaggaagtattttaaaaacgaatttcaatattttgaagaccagtctttttcaaccgaatattggtttgcgaaagcagcttcaagaaaggaaaaaatcaatcaattgtgctggaattcagaatatggatgttatctggattataattttgtaaatgaagagcagcatttttttgaggctgcaactactttttatccgctttgggccaaaataagcacacccgaacaagctgatattctggtaaaaaagacccttccaaaatttaaaatgaaaggcggaattgctggaagtaccaaagaatccattgcagctatagacgaaaatgcaccagtacgtcaatgggattatccgtttggatgggcaccacatcaaatgcttttgtgggaaggtttgctgaattataattttaatgaagaagcacaggaaatggtataccgctggctttggctgattactagaaatgcagtggattataacggaaccattccggaaaagtttgatttgtcgatcagctcgcataaaatctttgcagaatatggaaacgtcggaactgaatttgattttatccccgaagaaggttttggatggatgaatgcttcgtaccagtatggtttaactattttggaagaagatttaaaacaaaaattatcggacttggttgatccggatgtacttttttagttaaaaggggggggcttcgacttcgctcagccggacacaacgttatcatttaaattattgtgtccggctgagcgaagtcgagtgataagcttaacgaagtcaaatgtcatgctgagcaaagtcaaatgtgcggctcagcgaagtcaactgtccggctgagcaaagtcgagtgataggctcagcgaagtcaattgtccggttgagcgaagtcgagtgatagacttaacgaagtcaaatgtcaggctgagcgaagtcgaatgataggctaagcgaagtcgaatgtcaggctgagcgaagtcgaagcctagacctttctccccattaagttctccccaaaagtacgcaggatatttttcttttcagcgttaagatccatttgatccagcgtttcaaaagctttaaacgtatacatttcaatggcatcctgagtggcttttgaagcaccggattcattgaaaattgcttttacagtagctattttagcggtattgtcttctaattgtaaacggaataattgctctaactctgaagctttttcaggagaagaaaattctcttgctttgaggtataaatacgtttttttgttttcgataatgtctcctccaacttgttttccgaaagtttccggatctccaaaagcatccagataatcatcctgaagctggaaagcaagacctaaattcaatccgaaatcataaattaaatcaccttctttttcagatgttttggctacgatagctcccattttcatggcagcagcaaccagaacggccgttttatattcgatcatctttaggtattccggaatcgtaacatcatttctttgttcaaagtcaacgtcccattgttgcccttcacaaacttcaagagccgttttgctgaatagttttgctaagtttctgaaaacaatcggttcgtattgttcaaaatactgatacgccagaataagcatggcatcaccggacaaaattccggtattgaggtcccatttttcatgaacagtttcctgtcctcttctcaaaggcgcatcatccataatatcgtcatgtacaagcgagaaattatgaaaaacttccacagccattgcagccggaagtgctgttgtatatggggtattaaaaacttctgcagccatcaaagtaagtacgggacggattcgttttccgccgaggcccagaatgtattcaatgggtgcgtaaagattttggggttctttatgtatgctttgggtttttaaataatgaataaaaaaatcctggtactgactaatattgtgcataaaatgaaattctgatttgcgaggtccaaagatacgattcattatgaattattgcgtttttaaaattttaaaagatggtggaggaattagatagtggaggtaatttgataatttgataatgggtttttggtgtaagtgcgggaggcttcaacttcgttcaggctgacattcacattgtgattgtgtttgtcggcctgagcggagtcgaaggcggttttgggcttgttttaaaattattttcaaaaaaacttggaaacttttttggtattcagagtttcctgtttatatttgcaccgttaaatggaaacttaggacactaaaaaagtttccgcgaagaattgagaaatttataacctcagtaaaaacagtaatttatgaaaacaacatggaccttagattctagccaatcagatgttttgattaaaatgagacattcgattattgcttacatgggaggaactacaaataaatttggtggttatgtgaatattgaagacaatgaagtagaagatgcatcggttgagttttcgcttgacattaacaacaagattgataattttcagcaaattgatacttatttacaacttcaggatttgtttgatgtaaacgaacatccgattattagtttcaaatcgacttcgtttcaaaaagtaaacaacaatattaatttcttcaagggcgacttaacgattaaagatgttaccaaagtagtggaacttgatgccgagtttataggagttaatacatacaatggagagaagaaagttgcttttgaaatcaaaggagatattaagcgtcaggattttggtttagattacaattcgttcagtcataatggaggtttggctttaggaaaagacattaagcttattgcaaatttagagtttagcatataaatcttagagaatgaagtaaattaatgtaaaattattacaaatagtacggaaactattttcgtgaatttagtttcctcagtatatttgtaatacaatttgaaaattaaaatgaaagagaaaatcatatcaaaagcaagcgagttgtttttaaaacttggttttaaaagtgttacaatggatgatattgcaggagaaatgtgtatttcgaaaaaaacgatctacaaatatttctgtaataaagaagtattgattgaagagagcacatcattagttcacaaacaggtacatgaaataattgatacgattgtggcgaaagattataatgcgatccatgagaattttgaaatcagagaaatgtttagaaatatgtttaagaataatacagatacttctcctatttatcaattgaaaagacactatccggaaatttaccaaaacatactttcgcacgaaatcgatcagtgcaaccgttattttggagtcaatattgaaaaaggaatccgtgaaggattgtatcgtacggatatcaatataccagtgtatgtgaaattttattacaccttaatttttcatatcaacgaaactactgtttcagaaagtgaagcacaaaaaatagaactggaggcactggaatatcacaccagagctatggcaacagaaaaaggaatagtggaattggaaaagcaacttaagaaaatcaaagtataatcatcaatcaataatagtatgattttttaaatcatcaacacaaacaaatatctagcagcatatgaaacgaatagttctcttttttttgtgtacaataggtctgtcggccagtgcacaagtcacacgtttaaccttaaaagacgcgcttacttatgcgcttcaaaataaagccgatgctaaaaaggcgaaacttcaggttgaaaacagtgaatacaaaatacaggaaatacgctcaagagctttgcctcaaatttcggcaaatggaaatttaacacacaatccgatcattcagactaccgtaattgatggtgcaggatttggtgcaccggggactacgattcaggcagcatttggtcagaaatgggtttcgactgccggagtttctttaacacagaccatttttgatcagtctgtttttacaggattaagagcggcaagatctacccgtgagttctatcagatcaacgatcagttaacagaagagcaggttattgaaagagtagccaataactactattctgtttacgtacaaaaagagagacttactttattagacagtaattatgtgaatactactaaagttcgtgatatcgtaaaaggacagtttgacaatggtctggctaaaaagattgatttagatcgtatcatcgtaaaaatgtcaaacattgatacagaacgtcagcaaatcaaaaatcagattacgttacaggaaaacgctttgaagttttatatgggaatgccaattgaaactcaaattgatttgccaaaagaagagtttgaagtggtacctgctgccttgacagaacagccaaatactgcaaacagaacagagtacctgcttttgaaaaaacaacaggaacttttagtattcaataaaaaagcggttgaagcaggatattatccaacactttccttaactgctgggtataactatattggtcaggggcctcaaatgccctggtttgcaaaaccttctcagggagtgtactggtccgatttctctgcaattgccttaaacttacatgtgccgatttttacaggtttcggaactcgtgcaaaagtaagacaggccgatgttgagctaagatcacttgaggaagatatcaaggataccaaactttcacttgatctggactataaaaatgcgatggcacaaatcgataacaaccttgtgacgatcaccaatcaaaaagaaaatatgcgcttagcgacagaaatcttaagcaatacaaaaaacaattaccttcagggattggcctctttaacagacttgttagatgcagaaaatgcctctcttgaagcacaaaataattataccagagcagttttaaattataaaattgccgaagtagcattaatcaaatcaaaaggcgaacttaaaactcttattaaataactagaagtacaatgaagaaaactattataacaatcgtaatcataatcgcatctctgggcgtgattggatatatcttaaataaaaataagaaagagaacaaggaaaagacagatatcgtagcagaaaagaatgctgcagtttcagtaaaagtatctccggttaaaacagaagaagtttcacttgatttcgtagcaaacggaaacttccaaccgacccagcagttgacattctctgctgagaaatcaggaaaagtaatcagtgttctggctaaagaaggagactacgtaagagtggggcaaactttattaacaatgagaggagatgttatcaatgttgatgctcagactgcagaagcggcttatcaaaatgcaaaatcagattacatcagatatgaaaatgcttttaaaaccggaggagttaccaagcagcaggtagaccaggcaaaactggctttaactaatgcacagtcgcatttgacacaagcaaaaatcaatgttggtgataccagagtaaaagctccaattagcggttttatcaataaaaaatacatcgagccgggatctatcttaaccggaatgcctgcaacagcattgtttgatattgttaacgtttctaaattaaaattagtagttaccgtaaacgaaaatcaggtagcgagtttaaaaacaggagatcatattaacgtaacagcaagtgtttatccggataaaaacttctctggaaaaattactttcattgctgcaaaagcggatgaatctttgaacttcccggttgaaatcgaaattacaaataacgtaaacaacgacctgaaagctggtatgtacggaactgcaaactttgcatcgaaacaacaaaaacaacaccttatggttgtacctagaaatgcattcgtaggaagtgtgagcagtaaccaaattttcgtagtagaaaaaggtattgcaaaattaagaaaagtaactgccggaagaattttgggtgataaagtagaaatcatcaacggattaactgatggagaaactgtaattgtaacgggtcaaatcaacctgcaagacggtaacacagtagaaattattaaataattattggctttaagccttaagcaatacgctttaagccgtttaacaagagcctaaagcctatagcttacagcctatagcataaagcaaaatatatgaaattagccgaaatatccatcacacgtccgtcgttggtaattgtactctttacaattctgacattaggtggactgttcagctacagccagttaggttatgagctgatcccaaaatttgaacaaaacgttattaccatttctaccatatacccgggagcttctccaagtgaggtagaaaatacagtaaccaagaaaattgaagatgcgatcgcatccttagagaacgttaagaaaattgactcgaaatcgtacgagagtttatccatcgtttcgattacactaacatctgaagcaaaagtcgatttctctctgaatgatgcacagcgaaaaataaacgcgattattagtgatttaccggaagacgtaaaaacaccggcactaacgaaattctcgctaagtgatttacccatcatgacacttggtgccaacggaaaaatggatgaggcagaattttatgacttaattgacaaaaaaattgctcctatcttatcccgtgtacaaggtgtggctcaggtaaatattattggtggttcagagcgtgaaattcaggtaaaccttgacgctttaaaaatgcagggttacggactatctgttccgcaggtgcaacaaaacattttgacttcgaatctggatttccccacaggaaacatccagactcgtgatcaaaaaatattaattcgtttagcaggtaaatacaaaagtgttgaagaattaagaaacctggtagtttcttctcaaaacggaattcaggttcgtttaaaagatattgccgatgtacaggatactcaaaagattgctgaaaaaatatcacgtgtagatcagaaaagtgcgatcgttttgcaaattgtaaagcaatcagatgcaaatgcggttgcggtaagtgagcatttattaaagacaattgctactcttgaaaaagattataaagtaaaccagttaaaactggaagtagcaaaggatagtaccgtttttactttagaggcggcagactctgtagtacacgatttattaattgcggtagtactggtagctttcgtaatgttgttcttccttcatagtatcagaaactcgctgattgtaatggtgtcgattccggcctctttgattgctacttttatcggtatttatttaatgggatatactctgaacttaatgagtttattaggattatctcttgtagttggtattctggtggatgatgcgattgtggtactggagaacatctacagacacatggaaatgggtaaaagccgaattcgtgcttcgtatgacggaacagccgaaattggaggaactgtaacttcgattaccttagtaattgtggtggtattccttccaattgcgatgagctccggattagtatcgaatatcattacacaattctgtgtgacggtaatcatttcaacgatgttgtcgcttttagcttcttttaccatcattccttggttgtcttctcgttatggtaaattagagcatattgaaggaaagaatttatttggaagaatcattcttggcttcgaaagttatttaacacgttttacggactgggtttctcatttattaacctggtgtctggatcattatataaaaacatttgcagtagtaattgtattgttctttgcttcaacagttggtttaatggcaggggggttcatcggaggagagttctttgcttcttctgatagtggggagttcttagttcaaatcgaaatgccgaaagacgcttcgttagagcaaaccaacttcatgactcagaaagcagaagcttatttgaaaggacaagaatatgttcacagccagattacaacggtaggacaaaccagtgaaggttttggagcatcacaggcaacggcttacaaagcggagatcgacgtaaaaatgatcgaacaaaaagaccgtaccgacgatgctaacgtttatgcagcaaaaatcaaacgaaagttagaaaaagtattagttggtgctaaagtaaaaaccgttccggtaggtatcctaggaacagccgaagatgctacattaggattgatcgtaacaggtccgtcaacagaaagtgctatggcatttgctaaattggcagaagcagaattacgtacgattccgggaacaacagagattaaattaacggttgaggacggaaacccggagatcaacgttaaagtagatcgtgataaaatggcagcgttgggtttaacacttcaaaccgttggtttaaccatgcagactgcttttagtggaaatacagacggtaaatacagagctggtgaatacgaatacgatatcaacatcagatacaatgccttcgacagaaaaagtattactgacgttagtaacctgatttttgttaatgcagctggtcaacaaattaaattgtcgcagtttgcagacattacagaaggttcaggacctagccagttagagcgaagagacaaatcggcttcggtaacggttaaaggacaaaacgttggagtaccatcaggaacaattgttcagcaatggcaagtgaaattagacaaattgaaaaaaccagccggtgtaaactacatctggggtggtgaccaggagaaccaatcagaaggatttggtactttaggaatcgctttattggccgctattatcttggtttacttggtaatggttggactttatgacagttttgttcacccgtttgtcgtgttatttgctatcccgctttcgtttatcggtgcgatgttagccttggctttgaccaacaactcattgaacatctttacgattttggggatcatcatgttgatcggtctggtgtgtaagaatgcgatcatgttggtcgattatacgaaccagagaagagcggcaggggaatccattcgtaccgcattaatccaggccaaccacgctcgtttgcgtccaattttgatgaccactattgcgatggtattcggtatgttcccaattgcattagcatcaggagcaggagctgagtggaaaaacggtttggcatgggtaattatcggaggattgatttcgtctttattccttaccttaattgtggttccggttatttataatatcatggagaaaattatttataaattctctaaaggagaaaaaatcaactacgaagctgaaatgttcgcggattatacgccaacagaattaagtgaagatggttttaatcctaaacatacccattaatagttttgatttttaatagcgaaattctatagcccgaacttggaatttcaatgaaagatcccagattcctttactaaaattggaatttgggattttttatggtttaagagctgttagctgttgataaaaaattgatcagggagaacgttcataaaaaaatcttttggatgtgattcaaaaaaaatttttcagcacatagaaacatagatttttaacaaacgataaagaatacttaaaagaaatacatttctttcattccgatgcatcgggaagttttatttgaagtgaaatgcctagttttcaattaaaaaaagctatgtttctatgtgttaaaaaaagttagccccaacggtttaaataagaacttttttgatgtgctggttttctatagccgagtgtattttagttgagatctcgttataatcggggttgtagttgtcccatattttccagacatcgtctctttttttaatgaaataagtctgtctgttcaccttattcagtacaattgtagtaacgtcattttcgtttttccattccagattccaaaactccttcaccgtaagaattgcgatattttcttccagacttgaaatcttaaaatcataaagctcaaaattagaccgattatcttcacagtttaaatgatattttaaagtcgaataattttcaaaaagatccttgatcctttttgcaaaaggtccttctttgaatacaaaatcgcataatccctccatactaacgactggtaatttttgtaaagaattaaactcttcctgacaataatcgctaatcagtttttcaaaaaaggcacccgattccattttattttcagactgtaaagtttttacagcgtctgtcgcttcatcgttcagaaaatggtttaaagaaggatagccgataaaaatagccagtttgtccagactctttaaaaaccgcaaatcagagtttttggttttagaagagtcattggtgaaaatcctttgcaaggtcatgctcgagatcgaacatccaagctcatttcttttggagccctgcataaattccgatttctctaaaacatcagagattatttccgaaaggataatgtagtgcgctcttttccaatctgtaacaccagagagcgtactgttttgtatgattggatgtgattgtatgccctttattaatttttctattatgatttccataggcgaattttttaataattgacgttcgttttgacgataattaaatacaattcctgttaattaaatcctgattatagatttgtgtgtaagataagttattgttgtgatctttttagtgttaatgttctgctaaaattaataataaattcgttaaataatttaacaaattaaaaattaacaacaaaacccaaaagaattatgaaaaaactatttaccaaattttcgattaaaaaactggcacttgtactgctggcattgcttgccttatactcttgtgagaaaggaaatgaccaggctgatgccgttgctcaggacaaattaatggacggtaatgtcgatcttttagacaaaggaagatacggacttgctcagatgccggatgcctatttaaaaagtattgaatttttaactcccgttgattatcgtgcgagaattgcggagttacgaccagatttagtgacaagcacgcaaaaaatgtctttgacggctaaagttgcggccgcaaaaaacttaccgactccaccggttggagatcagggaagcgaaggttcctgcgtaggctggggagtgggttatgcggcacacagtattgcccggtaccttaataattcagtacatcaaagcaattggagcggggcttcaagaagtgcggcttatatttacaatcagataaaactggggaattgcggagcaggttcttacccgaatgatgccatgaatttgatcaaaaatcagggagaatgttcagaggctcaaatgccttacattgccggaggatgtaatactcagccttcagctcagcaaaaaacgtgggctgccgccagaaaaacgggaggatggtttaatgtgaatccaagaagtacagctgatatcaagtattatctgaatcaaaattatgctgttgcagtgtgttttgatgtcaatcagagtttttatgatatccgtaataacaaccatgtttggtccagtctttacggcagcagacaaggaggtcactgtgtttgtatcataggatatgacgatgctaccggactttttaaagtacaaaattcctggggagcaggttggggacgcagcgggttcttttatgtaacgtacaacaatattgctaacggtgctttcaattgggcaggatgtattattccaaatcccggagcgaattcttaacggtacaattaattcaagccattggttgtaatcgatttaaacacataggaacatagatgtagttgtctcaaaaaggcgcttcactaatttttaaaaatacatcagctatgtgagagaaaaatatttctctgtagtattctttttaggcgaaatgactatgtttctatgtgttgaatattattttttttgaattgcacttaatgggataactcaattaaaaaaggagacggtctaaatcagacagtctccttttgttttatagaaagtgatgagcttttggtggttttatttcttcactattttaatggttttgatttgtccttcagcttttactttaaggaaataaaatcctgtagccacattggataaatcaatttcagattgtgtatggtttatgctcttcgttaaaatagtctttccggaaaccgagattaattcaatttcatcaataaccgaagggttctgtatcgataagttgtgttgaactggatttggataaaatctgaaatcctgcagcacaaaatcaggtgtcgcaagcgatccgtttacttttgccgtaacggcaagacgttccgtactttcgattccgtctatggtttgagaggcataatacgtaacgccgtccactaaaatagtgttcggtggcaaaggagtttctgaagttttacttgttttacctgttgaaaggcctttagtgctgtaccattttatgttctgaccttcaataacaagatctcctaaagtttggcctggtttaaaatcgattgttattgttttttttccgcctattaaaggtgcaggaggatctatggtaacatgaattaatgcaatacatcccatagcgtctcttgcagacacctgatacatcccgtagttgaaaactgtaaaagtgttgcttgactgaaaagtgtttaaatctaatgaatattgatacggtgcagtgccaccggttgcggtaacagttatattttgattgtcgattgttgccgaaatcgctataggaattggtgcttgcagtattaaattgattgtttctgtacaattattagtatctcttacagttatggcgtaaacacccgcatttaaattcataaagttattgcttgtctggtaaggacttccatttatggaatatgtatatggtgcttgtccacctatagcatttgccatgattgctccgtttgaaacgcaggatactgaggaagtaactactgcagtaagatgtaatggatttggagctacaatcgttgttacaaaagtatagatagcattattagcatcacgcacttttatgctatagctgcccggagaaactgtaaaagtattggagaggttataagttacaccattatccattgaatattgataaggaaagacacctcccgatgccgttacggttattgttcccattggattattacaacctggctgaataacagtagccacagctaaaagcggataaggagccgaaatggttacctgattttgtaacgaagaacagcctttagcatctttaacaatcacactataagttccgggagcaagattattaaaggtatttgcgctttgcgccggaactatgattgtattattgctgttcaaaagggtgtaagtataaggagctgtacctccagtcgcatttacgattagagctccgtcgttactggttgcagttgttgcatttataatgattaatgtactatcaggagtagtacggggggctatcgtagcgtttactgctgcgatacagccattgctgtctttggcctttaaggtatatgtcccgggagttaaagtgaaagtattcgatgctaaaaatgtattagattcgttaaaagaataggtgtaaggcggttgtcctccgattgctgtaatggttgcaatatcaaaatcattacaattttgagcctgattaatggctacatttgccacgaaagaaaccggtgcttctatagtgaatacggtactaaagctgcatccatttgcatctctgacttccagaatataatttcctggatttacacccgtatagaaagaactagattgaaaaggaagaccgtttaaggaatattgatacggaactgtaccgccaacggcattaataactacatcacttacaagggaatagcaatttgtaatgggcgtatgagcgacagtcgctgttaaaggaacaggctgttccagcgttatagcatttacaagtgcagtacaatttaaagtatcttttaccagaatagaataagtacctgcaattaaattagtaaaaacgggattggaagtataggtaactccattgtctatcgaatattgataagatccgttaccacctgaagcgataacatctatagtgccattactaaggcagtctattgttttggtaatggcagctgtagcagttaaagggtttgcaggacttataacagcagttatagaagctgtagtagcttgtgaatctttaacttttatgagataacttcctgcaataagattactaaaaacatttgaagaagtataactattcccgttgtctatggaatattcataaggtggcgttcctccggttgcagtaacaataattgttccgttagaattattacagtccataggagttatttcagctgaagcggaaagaacaggtgacggagaaatttctaaataatctgattgaaaataacagccgtttgcatcgatagttcgaaccttataaattcgtgcaggcagattattaaaagtattagagttctgaggatctaccacaactacattattactttctaaagagtacctgtaaggcggtgttccacctgttgccaatgcagtaatcgagttaccattaacagcaagtgttgtttgtattaaagtaggttctgataatgtgacagatacaatagcctggcagccatttttgtctaaaacctttatggtgtgagttcccgagtgaacatttttaaaagtatcactagtctgaaatgggccgttgtcaagagcgtaggtataaggggactgtccctgagttacatttgcttttattataccatcagcagaactattacaacttatttgtgagacaatttcagctgaaaccaatactggttttgcaccagatatagtaatcagagcgctagtcctggaaccatttgaatcccgaaccgttacgccatagctcccggcatttaaattagaaaagacatttgaatctataaacttctccggattagacatggaatactgataaggagctgagcctccgtttggtgttaccgttaaagtagcttttgaatccgtacaggttataagagtcgaagtagcgcttgccgtaaatggaatcgattcggaaataatgatatttgagaatagaacttggccgccttttgcgtctgatacgattatgtcgtaggaaccattgatcaggtttgtaaatacatttgactgagttgtagttaatggaaatcccgaagacttctgaagcatataattataaggtgtgatacccccactggtagtaatggtaacggtacctttgtcgaccacataagaagaaacaagcggggtaggctctactactgttataggaatacttaccgtacatttattagggtcttttatagaaatagtgtgattaccataagttaccattccaaaaattctcgaatcctgataactacctccatcaagggcgtattgatattttccataacctccgcttgcattaacggttacagttctgtaaaaataggtaatttcggcagttatcggagcaggatcttctaatagtactgttgtcgaaacaatacagccgttagcatcttttgcagataaagtgtaattccctgcggccaaattttcaaatacgctataagaagtataaggtcctccgtttatggaataaaaaacaggcgattttccgttatttgtcattcccgtaattgaaccattagagtctccatgacacaatattctttgttgtgttgtcgttatttcgggtatttttattggatttatagtggcagttgcggaaactaaagcattttgtgcatcaagaacttttaaattgtaagtccccgcatttaaattagagaatacattagaattactataagtatttccattatccattgaatattgataaggaaaagttccaccatttggagtaatagtaatcgttccggtagtaatgacgcacgtaattggagttactgctgctgtcgtagtaagcggtgtaggttcattaaggatattaattcctttttgtgaaagaatacacccacgactgtctgttacaattgcttcatacgatccggctgctaaacctgtaaacggattagtcgtcttagaaggaattagttttccattgctgtctttaagggaatagttatatggggcagcaccaccggaaaccattagatttatttttccctcattcgtagcattgctgtcatttgttataattgggtttatagttatagcaggattaataagaggcatagttaaactaaaaaagatagtacatccggttgcatcctttatttttaccgtatagtttccaacgcttaaatttttgaaaacatccatcgttgtaaactcatttccaatagaatataggtaaggagcttttccccctgtcccggtaacttgaaaagtaccgtcgtttcctcccgaacatgtaacgcctgtcctgtagttaaccaaccatgacaatggttttaaagattctaccactattgtttttgaagcgacacagccattaccatcccgaacatatacagtctgatttccggggcttggattgataacagcattgttttgcgtataagtaactccaaaatgtgaatattcataattagaattccccccacttcctgaaatgactattcttggaacacaatttacatattcaacttttgcttcagccgttaagaggggaggttctgtgatctgaacaacttgagtcatcgaagtacagcctaaggcatcttttagggttatcgtatgagggccaggtgacaaattggtaaaggtacctacaggattaccagtataaaccgtaaaaggacctctatccagactataagtgtaaggtgctttacctcctgatggcaagatagttatgatgccattattttgtccgaaacagctgatagctgttgtaagaggagtaaagtttatctgatcatatacttttatattaaagtaattagtcgttacacttccattgttatctattctggcgtaaatagttctggaactttctgcactggtataatttgccggatttgcaatagtatttaagttgtcagttgcatctgcaaggcttaaatgataactaaccgttgtttcggcagggtttaaattaccaattaaaagtgttttttgagtagttaaattaaaggaagtatccccgtaacaatgctcgatttcactgacctgagcataaaaataattagaaaacagtaaaataaaaaaaagtagagtttttttcatacgtatcggtttgttaaaataggcaaacaaatatatacaaaaaaacgtactaaaactctagtgttgagatttggaatttaaaatttgtaatcgattatttcaagtacaaataatgattgtaataatcgataattgctttaccttcaagcagaacatcggcaccaataatgccatgaaccggttttgctttgtaagattccagagcttcattgacatgggagagatcaaaaattaccagactaaaatcgtggtttttccaacttccaagctgtaggcgattgtgctttgaaatttgggttaacattcccgttcctccggcacccgaagctttagttttagacttttttgccgtcagttcaaaacgttcaatactttcaaatcctacacaggaattagaggcaccggtatctaaaataaaatttcccgaaacaccgttgatttttgccttaatcgataaatgctgcgttttggtgaccttgaattttatttttctgtatttctcttttttgagaacctcgtgaagattttccattttcgattgtgattgaaaaccaaaaataaaccaattacccccaataaactaatgatataaaagatataatttgtcggttgtttctctgtttggatagcaccatagtatacaaatgaactccagtaatacggagattttttagcattcgaaatggacttgtcctctaaaaaagcacgttttgcattcgtattggcctccgcataggattgcccttttttgatgttttcataaaaatcagtcataaaaacagaggtcgtgtaatcattcactttccataacgaaaacaataaattctgagctcctgcaaattgaaatcctctggccacgctcatggcaccttcgcctttgtacaatttaccgattccggtttcgcaggcgctcaaaactactaaatcaggattgacattcagatggtataattcagaatataaaatttcctgatcgtaaaatttaatgctcgcaggagtttcaatatcacccgaagaagcgtgagtgctcaaatgtaaaatcgaataatggtttgcatcattcttgaaattagagaaagtagcttttgaattttccagatattttcctttaaaattacttctaatggcctctagttcctttttagagtaatccaattcaaaagaagtattttcgaaaaccgggaaaacgcccaaaatagtattttctgaatttgaaacgggcttagggttaagatacaggtttgctgaagtagcataagtaatcctgaaatcattcagtaaataatacatcttggcaaaattggtggtttttgagtcatttgtaatcaaagcctcaaaaggtaagaagtttaaaatgccatcgggaacaatgatgaggttttggtaaatagtatttcgcggcatttgcaataaatcatatacttttttaccatagtagctgtatcccgaaatatcgtttgtaatagcagctgaggtattaaaatagtttataaattttacaatattcagcatggctgtatgtgccgtgtagagacgattgagactgattcggctgttctgcaaggtgaaataatacaaattttctgctcccataaagtagtaaaccataaccgctttgtctttttccaatttcgaaaataaggtttttaggtcagtgatttcaggaagtaaatccgggtttttagattgaatttgctttagagagagcatcacttcgttctgtttttggattgctctgttgatggttgcaatattggccagactgcccttttgctgttcttttacaataacattgtttaaattttgaagctgctgtaaaagtgatttctcctctgttgttgcctttttgatattcgattgataactttttaaaaccccggattttgttttttcggccaattgaaaagccttttccagatattccgttttgttttctttttgaaacaaacgatcataaatcaaaaggcatttttcggtacgatttcgggaacgaatctggttgattatcctggagttttcgtaaagagtagtgttcatcaatatttcttcgatatgaagcgaaagttcgtaagattctaatgcttttttaagctgattttgactcaggaaaagctgagcctgtaaatcgagggcatcgattaaaaccgtttcggcatacaattgattttgatttggaagaacatcctgtggcgtataatttgcgattaaaagtttaaaaacggctttaagctgtttcgtgctttcagcatattttccttcatcaaaaagcaataaggctttttcatagtacagctttgctatttttcgggtttgtacatgaggtgtttgcagtagaagcttttctgctttcgctaaataagaattggaagcttcaaattgatgtctttgccgatttagcatcgccagattccggtaagaattagacaaagtctcagattgatttttctcgcttttcaaataatttacagacgactcaaaagtgttttcaattttctgatacagttcaggacgcattaaatctccagtgaaacttagcaagtaattattacccagattatttagtgcgattcctttctgagtattagacagtttctccgtttttaggatttgttccaataaatcaatggccggattgaatttgcccgagctctgatatacattggataaatttagaattgcagcaaatttttgcttttgggcatccggataattaggagtagtgttgacaataaagaaatactgttttatggtgttttctgcgctgtcgtaatcgcccaaaacggtatataaattgcctaagggtttcaggcagtattcgataatatcgtaatctgaaagtttgtttttctgataaatctgccaggctttttcataactcgcaacggccttttcagctttcccaaattgattttcataatacgctttattgcagtttaaaaccacaatagccagtaattcgtctttggttttggacttcggatttttccagaacacagattctgtattagtgagatcttgtaacgttttgggggaaggattggcaataaaagagtcaattgccgtatatatttgatcttcctgattctgtccaaacagaaaaagagttgagaagaaaaatatgtagcagtatcgttttatcattgtttaaaattttcgccacgaattcacgaattctggtcttttctcagaaattcacaaagaaggtttgccacgaattcacaaattctcaagattttttatttgttactttctttgatgctttatgtgtttgtaaaaattcgtgaattcgtggcaaaaaaaactcagtgtgtctccgtgaaaattctctgtgcatctccgtggcataactcctaaaatattcaaatttaaaaaaaggaaaattaaaatatgtaagcgatgtagtattacgagtgtccgtctgagcgaagtcgaagacctttattgtcaggaagccttcgacttcgctcagggtgacattcagtgacgaacaaaaaacatttaaaatttccagattccatatttttgatagcttttttgtttcacaaaattttctcagagattcgcaaagaaggttagccacgaattcacacgattttttatttgttactccctttgatacgttgtgtatttgtgaaaatttgtggattcgtggaaaaaaaacttagtgtatctctgtgacaatcctctgtgacaatcctctgtgtacctccgtggcataactcctaaaacttccagattccataaaactgaaaatagttgaaattctgttcaaaattaatcacataacgtgccccaaaactcggtccgattctggcaaacccgactgttaaatcgaatagaacccccgtttttaaattcccaaaaccgttctttatcgaattggattccgatcgggtactgattagaaactgatcatttccaccttcaaagttttccacttttttcgtttgattctgttctgatgaaacatcaaaattggcctggattccagctcccactccgatataattgttaaggttataccgaatcaaaaccgggatttcccagtttacatttttgttttcggttatcgtggtggtacgttgcaattgcttcacgccattggcaccagccacagtctgatcgatcactgttcggccgctttcgtatttgttcagggcgttaatccattctgcctgccaataaaaacgatacgatttaaaaggcgaaatggtcgccccaacaaaataactcgtcgatttttgcagatcaggatacaaattataacctgccttcgctccaattgaaattccgggaaggaatcgggttgtggcgtagttggtaatgatgggctcgtttttatcaaaaataatagcagttcggcttcgggtttttactttatgaaagtcctcaccaaacttcatcgaatactttacaaaaccctttgtactgtctttttcatgtacatttttctgttcgcttccgggtaagtaaatgtttttgaaggtaaaaaagatttgattctttttgataatggtatccaggcagcttgttgttggaacttcattttttggacagatggggcatttggggtataggtcttcaatctggaaggtttttttgtcgaacatatccggaatatccgtttcaagtctaatcattcgggcagggccttcaccgttgttttgaaaacgtgttttaaaatttactcttttaaaacgaaccagtctgtaattcataaaacgcccgttggatcccattttgttaggatcgtgagacgttacgatttccatttccagattcttgattttatgatttttataacttcggttcggaacaaaaataccgcgcatggtaaccgttgcactagtatctttgatcatttcgggagtcgttttaaaagtataaaaaacatttcgggtttcattgggattggcatcgtcaaactctaaaaccgaaacattatgataggttttatgggcgtcgagtaaggaagcatccaggtcttcttcgctggttgtatttctgtattttttgggtttaaaagtgttttcagcagaagcagtataatttttagaatcgtccagatctcctacagaggcaacggttttttcctttacttcacgttcgctggcgtaggttctgtaatcaaccagttcgaaattattattcttaaattgcttctcgttataaaacaaatacagttttccgctggagacataattctccagattctgataactcactacgactaccatttgctgttccggaatcgggtcacagttttttaaaatagcgaatccgttttgatcggctatagaagcaatgtctttataattggtgtcggtaaggtcatttacggctacttttttcggacgtgttgccggaggttttccattgtcgtaattgttggttacggcaagtctggtagtataggttcctttgtttttgtagacatgtttgggttcggcttccttgctgtaatgtccgtcaccgagttcccacaaataagaataactgggttttggagcaccggcaatgggaatcaaaggcggagtttcgggtttataagtaaccgcatttccattctgaatgaaaacaatattggcccttcgggttatggtgtcttttaccttcgtttgtcccattgcaagaatagaaaatagcatcaataaaatagacgatagtggtttcataactagaggtttttagccctgatgggagcggcatccttttgtcacggggttcgggacaaaagatacagcggacagcaggattagcttctgaaaagcatcagaattgatttgaaaactggattaaatgtaaaaaaaagtgatgagcaaatcatcactttttcttaaaaagtattttgtaacttactgaatagcattgattgcggctaccaattgtgcttcagttcccactgttgtctccccgagtgtaaaggtgtacacatcatttgcagcaacagttactgctttaatcgcatatcgccattggccattgtcttcggttacaaaaatcacatgacattttaagccaattggaatttgtccgtagtgctcgctaaacaatccggcaggagtataagtgtctaattttgcaagcgcattagtgccttcaccatcataagacaaataaaccgcactgttgttattgtcataaccatcaggagcatcaaccaaaagagtagtcttcggtcttgggtcactgtaaaaacggtcaacatttgtccatccaaaattgccaaaagtcacaaagtaattggttccttcaccctgaacgccgcctttacctccggttccgtcagcatttggtttaggctgttcccatgccagttcccctttctcatccatcttaccgacccataaagtcatagcattgtcgacaccatctgttaaagccgcaggcacaattaaattcatagaacaggaacttttaagttcaacgccaccctgagtagctctgatgaaaaactctccaccggaaatcaatagatttttctttccgtcaggcataacccccatagtaggtttgttggtaaccaacatcgttcctttgtcaaaaagttcaatgtactcaattgcaactgcccccgttaccgcaactccatttttggtaagacaatccccgttgatgcttagttttactcctttggccgaagttactgttaccacgccggttccggcagtaatggtaaagttttgtgtgttttttttcaccccttgttcacttatgcttttaaaagcagtagccgagggtggtaaaataagagcatcgtcgccgtcactattgtcgcagcttacaaaactcattgccagtaaaaataaaagtccgatttttttaaaatgtgtgttcatgatttctagttttttataaatctgtcctgatgatcaggtggttttcagatttcggttgttaattgtattggtatatcaatttgggtttgatattgttacccctgtttttgttttttctgagtttattctgaaagacacctgtcttcaaataaattgccgtcttcatctacagcaacaagaatgcttgtctttcgtgaaagcgttattgtaaaatagatccatactgtaatccagagtccgaatgtgatacaggtcagaaagaggtgcagcggatgattgattgcttttggttttttggataaaaccacatatggaagcttttcattatgctccacaaccacaaatccatttcgtgttttggcagaaatcatctgatgaaattgatccaaactcttttcgtttataaattgataggtttccattttcctgatttttgatggtttttagattcttctctgagactattttaggagctctttactattacatcaacttgatttgttaattgttaccttatgacatgaaatttatttccaattgttttttaaattagctacaaaatgattctttatggttaagagtaaaattcatcccgatcaaatgtatattgaaggcattgctgcaaataactctgcagtcattcaaagcatttacaaaaaattcgttcccaaggtggtcatgtttgtcatgaacaattccggagataaggaacatgctcaggatgtggttcaggaagtcatgattttactttttaatcaggccaaagcgaagacattgcaattgacttgtccttttgacgcttacttttttttattgtgcaaaaggaaatggcttaacgaacttaaaaaaacatccaataaaggggtaacaattaatgaggatgcagtatctatgaatgaatctgctcttgaattaattggtcaaaccgaagaatttgatgaaagacaacagctctttgatgtcatgtttcaaaaattgggagacaaatgtcaggagttgttaaaactaagtttcaccaccaaaaccatggaagaagttgcagcgaaactcaatgtgacttatgggtatgttcgtaagaaaaaatcgttgtgcgtagggcaattgacacagtggattcaggaagccgggaattttaaatcgttaaaaaataattagtcatgaacgaagaacgttacatattattcgatcaatatcttcagggagaaatgactgttgaggaaaaagatagttttgagaaacaattgtctgaggatcatgaactggcttcagcctttgaaactttcaaagaagtgcagttgcagctcaaaagtaaatttgaacacgaaagagagagagaagcctttacggcaaatctgacggagatttcagagaaacatttcaatacaaataaacctaaagtggttcagatgcgcccttggtattttgcagcagcggcatcgatcgttattttattcggattgttcttttttgattacaatcagaatcctgattttgaagattttaatcatcccgaaaccgcttcttttgtcgaacgtggggatgcggatgaaacgttaaaacaagcagaaaaagcattcaacgaaaagaattatgaactggcaattccgttttttgaagaaattttaaaagagaataaaacacctgaaatacaatatttttatggggtttctttactggaagaaagtgattataaagaagcagaagcagtttttaatgaactaaaatcaggttcttcagcttacaaagaaaaagccaaatggagtctggcactgtccaaattaaaacagaaagattacaatgcctgcagagaaatcctgcagaccatttcgcaggattatgaaaactacgatgatgttcaggagttgctggacgagttagattgattgtttacttaaaaggggaaaattattatactttcaaaccggacaggcttttaaaacctgtccggtttatttatataaaaaaggttttttacgtaaagtcgtaaacaaatccggatttttagttttacattcggctgattttttttttcagaaaaatttaccaaaaaacaatttcaacctaaccagttatttacatgaacaaaattactttagttctacttattgtatgcactcaaacgatctttggctctgccaaaatcacagaaaccgaaaaacttactgcgacctgcaaagtttggggattcttaaaatattatcacccaaaaattggcagtggacaagtgaattgggatagtcagcttttagaaaaattaccattaatagaaaaagcgcaaactaaagaagagttttcactaattctcgaaaactggattgatgatttaggagaagttaaaatggttgcgccaattgtaatcccaaaagaggttgaattcttcgataaaaattttgacttaagctggtttaataataagctgttttctaaaaaactttccaaaaaattgaagtttatcgaaaataacagatttcaaagcaatgaggaatttgattataattttgatagttttaaatatctgaaaaactatttcgatctggattacaccaataaaagttctcgaatactaatgttgtttgcctattggaatgtgatagaatattattttccctataaatatgtaatggatcaaaagtgggatctgagtttacagcaggtactgccacttgtgcttgaggctacaaaaggaaatgaattttacatagcacttaaaaaactgacagccaagctcaatgatagtcatgtcgaaacaacaacgtacggaccggaagttgtcgggaaaagaccggtttactttcctgcaacgggtagaataatcgaagaaaagctggttgttacagagatattaggggatagtctggctcaggcagacaatataaaaatcggagatgtaattacaaaaataaagggtaaaacgataaaagagttaattcaggagaatcaggacttaatcagtgcttctaacgaggctaagtttttagataaagttacgttgcctattttgaaaagttacgatgaaaatgttgaggtagaatttttaaaagacggccagtacgaaacaaaatcaatgatttggtttaattaccatgattctcatcgaaatgaatttaaaaagggagctattaaaaagaaagagaagtttaaactgttagacaataatatcggttatgtcgatatgggcgtaataaagaatagacatattccggatatgattgaagctctgaaatctacacaggcaattgtttttgatatgcgaaattatcccaatgaaacgtatgaattaatcgccaattttttgaatcctgcggaaaaaaaattctgcgattacaccatgccctatttaaattatccgggacgttatacatggaaagaagggataaagtgcggatttgaaaataaagataattataaagggaaagttgtagtgttgcttaatgagcaatctatgagtcaatctgaatggacagcaatgtgttttcaagccgcagggaataccatcataatcggaagccagaccgcaggaacagatgggaatgtatttgatcttgaatttaaaggatttcatacccgatataccggaattggggtttattatacggatcgacgtgaaacccagagaattgggattgttccggacattgaagtcaaaccaaccatcaaaggaattcaggaaggtaaagacgaagttttggatcgcgcattactgtttgttaaaacagggaaataactaactattttataattattcaaaacctgtcgggtttacttttagaaaaaatccgtttttatccgcgttttcgcgaagtgaatccgtaaaaatccgcgtgccatttttcctcattttattcaaattgggaaagtttttaatattatcgtaattttgggccattaaaaattataacaattgaatttgaagcccataattaccgatacgcatacccatttatattctgaagaatttgatcaggaccgcgacgagatgatgcagagagctataaatgccggagtaacccgtttttttattcctgcgattgatgccgctgccacacagtcgatgtacgatctggaacaaaattatccggattatgtatatttaatgatggggttgcatccgacctatgtgaaagacaattacgaagaagagttaaaacatgtagaaacggagctggccaaacgaaagttttacgctgtgggtgaaatcggaatcgatttgtactgggataaaacgcatctaaaagagcagcaaattgcttttaaaagacaaattcaactggcaaaacaatacaaattacctattgtaattcactgtcgtgaggcttttgatgaaatttttgaagtactggaagaggaaaaatcagcggatttatttggaatttttcattgcttttcaggtacatacgagcaggcacttcaggcgctgtcttacaatatgaagctgggaattggtggagtggtaactttcaagaacggaaaaatcgatcagtttctaaatcagatcgatttaaaacacatcgttctggaaaccgattcgccttatttagctccaattccataccgtggaaagcgaaatgaaagcagttatctggtaaatgttatcgccaaattagccgatatatatgatgtttctgaggcagaaattgcagagcgaaccactcagaattctaaagacgtttttgggatttaacccgtaccttacaatagtttaattttttttttgttcttttgcccacttaataccaatataaataatgcagagatttgatgccattcgaccgttttatgattctgaaataaatgaagcacttcatgatgtagtcaatcatccaatgatgaaaaccatgatgaactttacttttccggaagtagcagatgaggtttggaaagagcagctaaaaaagacacattctattcgtgattttcaatgcaactttatttataacaccatacaaaaagttttagagaaaagttctgaaggtcttactacttcaggatttgaaaaactggaaaaaaacacctcttacttattcatctctaatcacagagatatattattagacactactttattaaatgtttgtctttttgagcacggattagtcatgacggcctctgccattggagacaatctggttaaaaaagcattcctgagtactttggcaaaactaaatcgaaactttttggttctaagaggtttatcgccaagagaaatgttgcagagttctaagttattatcggaatatatcggacaattattacttcgtgagaatcgttcggtttggattgcacagagagaaggccgtaccaaagacggaaacgatgaaaccaatccgggagttttaaaaatgatcggaatgggatctgatgagcctaatctaatggattattttaagaaattaaaaattgttcccgtgtccatttcatacgaatacgatccaacagatgttctgaagatgccacagttaatggccgaagccaataatgaggtttatgttaaagacaaaaacgaagatttcatgaatatcctgagtggtatcatgggaactaaaaaaagaatacacatttcggttggagatgttttagatacagaaatcgatcagattacagcagagaatgacaatgccaacaaacaagtacaggctttggctcaggttattgacgattcggttttgaaaaattatcaattatggccaactaattttattgcttacgatattttaaacgagaccaataagtttgctcatctgtacaaagaaagcgaaaaatcgttgttcgagcgtcgtttagaaatgcgtatcggaagtgataacccagtaacaagacaaggatttttggccatgtacgctaatccggttgttaataaattaaaatatcaggatgtcatctaaaccaaaaatactactaatctataccggtggaactatcggtatgagtaaagattttgagacaggcgcgctcaaagcgttcaactttggtaaattattacaaaagatacctgaaatcaaacaattggactgcgatattgaaacggtttcgtttgaagagccgattgattcctcgaatatgaatcctcaagagtggacgaaaattgccgctattattgaggaaaattatattgcttacgacgggtttgtagtacttcatggttcagataccatgtcgtattctgcttcggcattgagttttatgttggagaatttggcaaaaccagtagtgtttacaggttcccagcttccgataggagacttgcgtaccgatgctaaagaaaacctgattacagccattcagattgcttcattgcaggaaaacggaaaaccggtaatcacggaggtttgtttgtattttgaatataaactgtaccgcggtaaccgaacttcaaaagtaaatgcagaacatttcagagcatttacagcaccaaactatccggaattagtagagtcaggagttcatttaaagttgaacacacatttatttcttcctgtaaagacagacgcgaaactaatcgttcataaagaaatggacaatcatgttgcaatcatcaaaatgttccctggaatgagtgaagtggttttagcttcaattctggcgattaaagatctaaagggaatcgttttggaaacctacggttccggtaatgcgccaacagaagactggtttttggatttgattgagaaagcaattcagtccggattacacattgttaacgtgactcaatgttcaggtggaagcgtcaatatgggacaatacgaaaccagtaccgctttaaaatctcttggagttatctccggaaaggacattaccacggaagcagccataacaaaattaatgtatctgctgggacaaaatattccgcaaactgaatttaaggcaattttcgaaacagctttacgcggggagatttcgctataagataaaaatccaaattataaattccagattccaatcgtttgctgattatatcttcattttggaatttggagcttatcaatttttgtagcgaacctcacaagttccaaactcttcttcagaactttgttttttgtagtacacataaacaattaccgaaataatacacacaacaccctgaatggcaacagtttctcgggttccgataatgtgcgaaacatatccgataatcagacttcccacaggaatcattccctgatacgccatcagatagtaactaatacttctcgaacgcaggtgcacaggactttgtgtctgaacgtaaatatttatagaggaagtttgtgccatcattcccaggccgctcagagccatgcaaataagcgccacagtgagactattggaataggccagtacgataatgctaaaacctaataataagctcgcagcgatcattattttacccatattgtctgcttttttaagattggccagataaatggcagacagtattgaaccaattccggcagcactttcaaaccaactgaaagtctgcgcgtttccgctaaaaagatccttggcaaaaacaggcattaaagtattgaacgaaatcacaaacaagctgctgcacattaacatcagtagcattttggccatctcactttcttttttaatataatccagaccttcaagaaagtcgtctaccattctcattttttcggtggctttaatatgcggtgtgattttcatcatcaataaagaaatcagaaccggaatgtagcttaagaagttaccaataaaacaaatgtcctcaccataattgtgcagaataattccggctaaggcaggtccggcaattcgggcaaaattattcagcgtagagtttaaggcgactgcattgggtaagtcctctttattgtcaacaatatcaatcatcatcgtttgtcggcaagtcatgtcaaaagaattgatgattccctgaattaaactcaaggccagaataaagttgatgttgtatatttttagataaattaacagggccaaagcacctgcctgaagcatcgccaaagattgcaatagaatcatagcgcggtgtctgtcgtaacggccaataatacttccggccaagggagccaggaacaaggacgggatcatgcttaaaaatgtcgctaatcccagtaagaaaaccgaacccgtaacactgtaaatcatccagcttacagctgttttttgaagccaggttccaattacagaaacagattgtccgtaaaagaacaacttgaagtttttagattttaacgctttaaacataatgcctgatatttttttacaaagttcgggattatgatttcattagaaaaattaataattttacttataataagtagtaaaacttatcattatggaaatttatcaattggaatattttataaaaaccactgaggtacttcattttaccaaagcggccgaattgtgttttgtaacccaatcgggcttatcacagcaaataaagaaactcgaagaagaactcgaaatgcctttgtttaaaaggatcggtaaaaaagtacagcttactgaggctggtgctgttttcctgattcacgccaaaaaagttattgagaatgtagaaaacggaaaacaggctatcgaagatttaaacgaaatgattggcggtgaactgcgaattggcgtaacctatatcttcggacttttaattttgccggttatcaatacgtttgccaaacaatatcccaatctgaaaattgtcgtcgaatacggcacgacagaagctttagaacaaaaattattaacgaacgaattagacctggttctagtgatttcgtcacatgaaataaatattcccgttgagaaagttcctttgtttacgtcacaaatggtattggtagtttcgaaaacacattctttagcggctttagacaaaattgcatttaagaaaatagaagaaattccgcttgttttgccgggaaaagggtcgaattcgagagaatttgtggaagaactatttgctaaaaacaaaatgagacccaagatttcgatcgaactaaactccattcacgccctgctgcaaatggtgcaggacagtgactgggctactatagttgccgagaaagccctaaaaggctgggacgacctcaaagccattcagattacaggagttcccacaaaaagagaatcgtttatgctgacccttggaggctaccaaaaaaaggccgtaaaactgtttatggaagaatttcgaaaaagtatgtaaactaatatccgattttgtttttctaagtcatttttttttatgttatttgcagaccaatttagaaaggtgtccgagtggttgaaggagctagcctggaaagctagtatatgggtaactgtatcgagggttcgaatcccttcctttctgcaaatttttaacgtaaagaataccaaaccccgaaacttttgtttcggggttttttattaactttctccaattatcaaatcaacatcaaaatagctgaggattaaaaaaaactttggtttcttttgtgcgccgttgaatataaaaacaccttttttaaatggaaaagcagcaattaattttttacaatactgttgacggaaaatctaatgtagttcttcttgtaaaagatggagatgtttggatgaatcaaactcaattggcagaactttttgatacctccaagcaaaatataagtttacatgttgtaaatatcttaaaagagaaggagttagagaaaaaatcagttgtcaaggattacttgacaactgcctctgatggtaagcaatacaatgttatcttttattctttggccatgattttggctattggttttagggtacgaagcaaaagaggaacgcagtttagacaatgggcaaaccaaaaccttcaggaatacatgattaagggttttgtcatagatgatgaacgccttaaaaacccaaacggaaggacggattattttgatgaattactcgagcgaattagggatattcggacttctgaaaagagattttatcaaaaagttcgagatttatttacattgagtagtgattatgatactacagacaaggcgactcaaatgttttttgccgacactcaaaataaattgctttacgctattacaggaaaaacagctgccgaaataattgtttcgcgtgccaatgctgatgctccaaatatggcacttacgaactggaaaggaagtattgtgcgtaaacaggatatctacattgcaaaaaattatcttactgttgatgagatagacacactgaatcgttttgtagtggtatttcttgaaactgctgaattgagagcaaaaaacagacaagatattacaatgggcttttggaaaacaaatgttgatcgaattatagaatttaatgataaagaagttttaagtcataaagggaaaataacgcatttgcaaatggaggaaaaagtagatgcgatttatgaaacattcaataaacatcgtagacagttggaagctgaggaagcagataaacaagatcttgaagaattaaagcaattagaaagcaagcttaaaaacaaatcaaactaattttattgcgaaagaagctttagagttaaaatcgaggtgttcgagtggttgaaggagctaacctggaaagctagtataggggtaactgtactgagggttcgaatcccttcctttctgcaaaaagaattaagaaacgcaatttcgtgaaaatgaaattgcatttttttattatatgcttttttaaaacaggggtatatacttggtcaaagtttgtttgaaggttatatattggtacgcaatcaaatattttatttcgattagtatctatcttaagatgactgttatactattttttaattgaagttagttagaaaaatcgatttgcgaatagatattttgatttaaagaaaattaagtccactaatattagaaaatcaaaattaaaatttatggctaaaaatgagagtgagatagagtatttaaacgctgagagattgaaactttgggagagattaacacaattagaagaagagatcagcaaaaaaacatctgattatgagaaagaggctaaacaatcctctaaaaaagcttctgaatataggaacagaagtaatgatgctaaagatcaatctatcaaaaatgctgaaatttcattagttaaattagaagaaataaaaggtttttcgtccgaaatagtattgcttaaagaagaatgcgaaaagaatacgcaaaaaataagtgaattttatacagatattgaatctaggtcaagtgttattgaggaacatctttcgactttagaagaaaattttgaaaacaataattcatttgttgagaagttagagacattcgaagatcattttgaaaaaagtaacgagatttacggtaaaattgaagttttacagaaatctattcagtcaaaaaaaaggaaaattgataatttacatagagaactatttggttataccgaaacagagtttaatgatgagggagcagaagtagaaattgcagttgaagggctaaaagatcagcttgagagtacttatgataatttagaagataatttaattagtctggaaaaagattttacaaaattaaaagaagatacattaagtaactataattcatttgtcttagaaaaagaaagcaactataaagaaaaaatggagaagtgggataatgattatgattctgttttagataaaattaataaattattaccaaacgcaatgaccacggggttatcttatgcatattctgaaaaaaaagaaagtgaagttgatgatagcaaaaaatttgctaaaaactttcaatatgcggcatttggtttaataggaatgtcattaattccttttatactaagtgtattctttatatatcaaggcaaaaccttaattcaagtaattgattatagccccagatttgttttagcaattattccgatgtacattccgattttatggattgcgtactcatcaaataaaaagcttaatctctcaaaaagattaattgaagagtatactcataaagaagttttaagtaagacgtttgaaggcctttctcatcaaataaataatattgaagaagaagatgttcacactgatctaaaaataaaattattgtataatatattaagtgttagttctgaaaatccaggaaaattaatctcagattataataaatcagatcatccattaatggatgcgttagacaaaagcgctagtttgtctgatgctgttggaaaacttgaaaatattcctggcttgtctaaaattgctagaattttagataaaaaagcaaaaaggatattgaaagaacaagcggagaaagttgatgacacattaggagaagtggtaggagaagcacttgatgttagtgatttaaattaaattatatgaatagtgtaatttcattagtttataatagatccattcaaaatttgattgataagctacaggttttattgcttaaggaagacggttatttaaaaggagatgcggaaactggaagtttttttataaactcaacaatcgggatctttcaaggtacgtataagactcgaaataatgttataaatatatttattgaaaaaaaaccattttttattagcaaaaaactttataaccattgcaaagcagaataaaatttctaataatgcagaaaaagcgatgccaaacgctacaacataaacggttttaataaaaaacaaacctgtaaaacaaaaagcgaaaaagctaacaaatgcaataaattgatttttagaaataagatcgtatctattcattggcataaatacaaaatttacaatacaccctactaacaaccatgacattatagtcaagctcataatgatagttaaattatgtgccatttgtacattttcatgcaaaaaaatttgaattacatttttaccaaaagagacaactaggctaataaaaaaaagtccaatcaaaaattcatacaaaaaaactttttttacaatttttacatctatttctttagattttaaaattttggggaaaagagcgttgtttatatttgaaactatcgattgaggtaataatatcactttagaagctaaatcaaaataacttacttcgttcattccaacgtacgaaccaataaataatgttgtactttgtgctcttattacacttattgaagaatttagaaaaaagtgatatgattgccgtaaaaaactagctatccgattaaatttaactactcgaatagtcaatctttctttgtaaattaaatataaaaaagaaagaaaagctatcataaaaacacttccagatataataaaactgtaaagaataagatcttctgcatttttaataacacaaaaaataacagcaattgaaacaattcttattactaattgaaaaaaaacaaaccagcgcattttttgcaatccctgaaaataccaattgagcaaaaagatactcgaaaaagcctgaagtgaatttatcagcaataatttactaagatttggattaaaccaaattacacaaaacaatgctaacaatgaaatacaactcagaaagactttagtacttacaacatcagataacaattctgacttaatctttctgttgtcaatgttttgagacaaaatttttaaggccggcaaatcaattccaaaagaaataaacaaggtaatataagaaataattgttgttgaaaacaaaaataatccataatctcctgccccaaatatttttatggaaaatggataaattaaaaaataaaataaagtattcataatctgaactgctgtcagatatatgtaattttctaagagtaatttttgtcttttgacctcattaattgaattaatcacaaactccttaattgccactatactaatgtattaaatatgttaaacgaatgtttttagtaaaaattacgatgtttcgtttcttcatataaacgctcctctggtaaacttttgaagtattcgtaagtaattcttaatccttcttctctgtttattttaggttcccaatctaaaattgctttagccttagtaatatcgggttgtctttgtttaggatcatcttgtggtaagggcaaataaacaattttctgatcagtatttgttaatttaataatttcctgtgcaaaatcattcattgttatttcatttggattaccaatgttgacaggatgtgtataatcggacattaaaagtctataaattccttcaactaagtcatccacaaaacaaaatgatctagtttgtgtgccatctccaaaaattgttaaatcttctccacgcaatgcctgacctataaaagcgggcaaaactctaccgtcatttaaacgcattcgaggtccgtaggtattgaatattctaactatcctagtttctagaccatgaaaagtattataagccatagttattgcttcttgaaatcttttcgcttcatcataaacgcttctgggtccaactggattaacatttccccaatagtcttcggtttgaggatgaacctttggatcgccatatacttctgaagttgaagctatcaaaaatctagcttttttttcttttgctaatcctaagagattatgggttcctagtgatccgacttttaaggtttgaattggaatttttagataatcaattggacttgctggagaagcgaaatgtaaaatgtaatctaatttgcctgaaacatgtacaaaattactaacatcatggttataaaatttaaatttttttaatggaaataaatgctctatattttttatatcacctgtaattaaattatccattccaacaacttcatagccttctgctataaatctatcacacaaatgagagcctaaaaacccagcagctcccgtaattaaaattctcttactcataaaagactatatttgataatatttttaatacttatttaataacgcaaaattcatttcttttacgaacctattccattgtaaacaaaacctattgattgcaattctttcgcattcaaaatgtttcttccatcaaaaacaaaagcaggcttatgcatagactcataaattttttgccaatcgtaagttgtaaattcatcccattctgttaaaactgctattgcatgagaccctctacaagcgtcataaacattaccaaatgtggttaatgatttagcattttcttctgcaggtcttgtttctagataatctaaatcgctcatcattttatttcttgaaactttcggatcatatacagaaatttttgcttgttcgttaattaaatcatcggccacataaattgctgcagactctctggtgtcgttggtatcttttttgaatgcccagcctaagaaagtaatttttttatcggctactgtattgtataatgtctgaacaattttattagaaaatcttcttttttgatgatcattcataataataacttgttcccaataatctgctacttcatttaacccatatgactttgcaatataaactaagtttaaaatgtctttttgaaaacaggaacctccaaaaccaacagatgcctttaagaatttaggtccaattctactatccattccaattgctcttgctacttcattaacatcagcacctgttttttcgcaaagctcagacatcgcattaattgaagaaatacgctgcgccaaaaatgcattagcggttaacttcgacaactctgatgaccaaacatttgttgttagaattttatctttatttacccagtttgcataaacatcaaccaaagcattaattgcagcttctccttctggagtagaatctcctcctattaagattcggtctggatttaataaatctgtaactgcagttccttctgctaaaaattcaggattcgataaaatctgaaattgaacgccattacctgtattatctaatatacttttaattgcctcagcagttctaacaggtaaagttgatttttcgacaacaattttattttgttttgcaacttttgcaatttgtctggcacataattcaatgtattttaaatcagctgccattccttttcctttaccataagttttggttggagtatttaccgatataaaaataacttgagcttcatcaattgctttttcaacttctgttgaaaaaaataaatttctccctcttgcctctaatacaatttctgaaagcccaggctcgtaaataggaatattatctgtatttggatcattccagtctataattctttgttcgttcaaatcgacaacagtcacttgaatatgnnnnnnnnnnnnnnnnnnnnnnnnnnnnnnnnnnnnnnnnnnnnnnnnnnnnnnnnnnnnnnnnnnnnnnnnnnnnnnnnnnnnnnnnnnnnnnnnnnttaccgccatagttggacctccaacataaccagcaccaatgcaacaaatttttgtaattttcatttactatactattattttttaatttttgtaaaacaatatctaattagttaaattgattttttttttaatagtttgtctatttattgtatataaggagtaatttctcattgaaatttacatagctaattatttttataaaaaaaagtaataataagcaagattaaataatcaaaatcttgtttagcttttcaaatttatttagttgttaaccataaaattaaaaaacgactattctacttttacaatttaattattagtcaaccttatgctaataactttttaaagactctatttacaactaaagcaaatagaaataaaatagtacctaaaacacctccaaaaacaaaacctttaatttttccaaaactctcttttcgtaatggtaaaattggtttatcaataacttgtattaaaggtgtttctttacgcaacgttactttcgctaattcactttgcttaaccaattcagtaagtatagccgaatttgcctgaacatcaacttgtcttctagatgaaggagttcttcttacattaagcgccggatttaaattaaaagtattatcattagcgatagctacaccagtaattgcgctattaagttctcttttaatagaatcgacttgatgttccaaaatagacatgttcgttctagcttttttactttttgtttcaacataaaattcccctacttctttagctaaagcttcacatagatacttagaaaaaagctcgtcagtagattttacatcaatattaattatagatattttcttatctttttgaataacactaagccctttcattgataaattttcataaattttccctaatacactatcttgagcacgtgtaaaagttctacgatcagcatttgctaaaaatctcatattaactaatgcagaatcatcattccatttctttctccactcattgttttgaatatacatttcagcaagagaagttactttccccttaaacctaactggagataagagcgttttttctaccatatacctagatttgaacaattcagttaagttagcccctgtaaatatacctcctccacttcctcctaaatctagtccaaatgaacttgccaaacctaaagcactcccgagacctccacctccacctcctttctcatcttctaatgcgaatgaaagtgtagcagtgtatactggctttgtcataaatgaatatgtaactcctaaaattgccccaattactccccctagaaagataattttccagcgatacaataagtaatcgatccaatttttaacttttactaataaatcttttaatgaaatttcatcttttgcaatattcctactttccattatacctatctatttaaaagccgttactattaataatgctaaactagaaatcacgctaccaataccaacccattcccctgctgtcatttttttggtttgaggtttttcaggaacaacaatttgggaatcaggttctactctaggataagatctaaaaaacaaaaaagatgtcgttacagaagcttttccatttggataaataatataagcctttttcttccatcctttgctatcgacacctcctacagaatttatgtaatacttaaaccctttaccacttctatatggaatctccgatgtcaacaatacattgccagtaactttaactccttcattgtaaactgacacctcgatctcatcacctgggaacaaagtaacgtttgaatagtgattcttatcttttacgatcttttcccaatttacaggaatagtagcaaattttaactcgtctctaagttttttagataatttagaactaagtgtatctttttcttttaaatttagaccttcctgttttggtttcatcgcttcttcttccgcagtcagttttttatccaaattaagatttacagtttctaattgctctatttgctcttgctttattggcctttttattttcataccatccagattcgcaatagatgttaaacctcctgctctcattacaacgttgtaaacagtttcctttttattggctagaacatatttacccggataggtaacagctccacttaccttaaccatttcaggcttttcgtaaactgccattcttcttatgttaatcacatcaaaaggctttaacacaaagtttttaatctgttcgttgttatcagcggtaatttcaagctcaaccaattcaatttttttagggtcagcatcatcgattacatcagattttaccattcgggctatttcaactctttttgatgccgatccagtcaaaccaccaacttgtactactagatcatttaaagttagattttcgaaatactcgtattcaccaggatttttaacttctccatcaatagttactttatattcctctctaaactctaaaatagaatacaccgtaacaatatcttctcttttaagctccaaatcagcatttaaatctccagacaaagcagcacttaaatctacattaactatctcagttgttaaatcggtcttcaaacgaataattcttgctcttttggtataagcatcttccttaagtccttccgctcttgtgataagatctgaaattctcattccttcattataagagtaataatccggtctgaaaacagctccttcaattttaatacgattttcgaatcggttcaaaatctttgtaaccttgaacacatctccagattgcggaagatacgaaccatattcactttcgttgatatcatgaactttaaactcctttccagttttctgaagtacatttactgaagcggtataagcaaactcattgaatcctgatgcaaaattcaaaagatcagaaaatttttctccttttctcatctcgaaaattcctggtcgtttcacctctccctcaactgtcactctttgagtataagcagggattctaataacatcattatcctttaaactaacgttatccgactgatcgccttttaccaaaaacttgtaaatatcaacattcttataaactctgttatttcgaatcaattctatatttctataactgccattcttacctggcccccccgctaaatgaagtgcattatatacagaagcaagagaggaaacagagtaattacccggttgcttccctccaacaattgttactttaattgttctaatatcacctaaactaacactaacctgagattgtccggaacgaaccgtactataaactcttgcgatcgccgcttttattctttgtgaagcagcttcaattgacattccggatactgctatttgtccaacattttgaattgaaattttaccttcaaaattaaccggaactgtatcatcaaactgttgaataccatatatactaacttctaatttatcacctggccctaaaatatagtttaccggtgttgccattttcaaatccggttcaaaatttaaagttggattatcaaataattcagatccaaaaatcaaagcgtttaatgaatcttttattttttcatttttaatcttctcttgttttcttccaaactcagaatctttatcaagctcttttgacttatcgtctttctttttatccttatctttcgagttcttatctttgtctttaacgttttttttctcgtactctgttactcgtgttcttaatttatcgaattcactctgagtcattccttttgacaaagccattgactgaacatcgttaatggtagcattattactttttaactgagtaacaatcttaccgatttcgtcatccgataaataatcgacttttacagtgcttaaatccttcgactttattatatcctgagcacttgcattaaaagacacaagtaaagtaaaaaacaaaataagaacgtatagtatctttttcatatttaaatttaaatttaaccttaagtttggttgaagcgaaatgtttattttatgagtattgtttatgataataatctttataagaaccggaagtcacattctgtaaccactcttcattattcagataccaattaatcgttttttctaagccttcttcaaaagttacagatggtttccatcccaattctttattaatttttgacgcatctatggcataacgcaaatcatgtccaggcctgtctttcacataagtaattaattcttgtgaagtcccttctgatctacctagtttctgatccataatctggcataatagtttaaccagatctatattcttccattcattaaaacctccgatattgtaagtttcatgatttttaccttcgtgaaaaaccaaatctattgcaatcgcatgatcttccacaaataaccaatcacgggtataattaccatctccataaactggtaaagctttattattgataatattatttataaaaagaggaattaatttctctgggaaatgataagagccataattgttagaacaatttgtcaacacataaggcaaaccataagtctctccataagctctcacaaagtgatctgaacttgccttagaagcagaataaggagaattaggatcgtaacaagttgtttctgtaaaaagtccctcagttccaagtgagccataaacttcgtctgtactgatatgataaaaacgcttcccttcaaaattccctttccattgattcttcgctgcatttaataaattcattgttccaattacattagttttaacgaaagctaaaggatcttcaatagagcgatcaacatgggattctgcagctaaatgcaaaacaccgtcaaaattatgtgccgaaaaaagttcatttataaaagtttcgtttacaatatctccttttacaaatgtatagttagacttatcctcaatatctttgatattttcaaggtttcctgcataagtcaacgcatctaaattaaaaatttgatactcaggatatttatttacaaaacgtcttactacgtgtgaaccaataaaaccagcaccgccagttataagaattttcttcattttgctttctgattaatttaataattctgaattttgcctttctaatgcgctgtatatgtctttcacatcttgagaattctccttttgaagaatcagattcgcagtatctgtgtgaacgaaaattgtgttttttaatcctaaaaaagttgtataactatcacatccaattaccatattgccatttacatctactggatgtccttttgacaccaggtattcatataccgactcaaaagatcccaaatcagaccaagaaaaagaagcaggaactacttttatcttcttactgcgttccataacggcataatctatacttattgatggtatctgcattgacaagtctagatctagaaatccctctttagaagcctcccaaactgcttttgatttttcgtacacatcaggttgaaattgttttaactcatctaacaacacccctgatttaaagcaaaacattccactattccacagaaaattacctcttgcaataaattctttcgctgttgtttcatttggtttttctctaaaagataaaacattatcgtcttttgactcgatataaccatatccagtttcaggttttgtaggtataattccaaacgtcacgataaacccatcatttgcttttgcaatcgctttctgaatagcattattataatcatccattttatcaataatatgatcagacggagttacaattaaaatatcatcaggattagatgcgaaagcagcaaaagcaattgccgctgcagtatttctcggtgtagcttcaacaatgtttagataattcgttttagttttattcattacttttccactcagatggtggttatcaacattaccaacaaccataactttatccgctaaatggctattgcgttcaacagtaatttcaaacaaagatttattctcaaatatttctagatattgttttggctgacttttacgagaaagtggccataacctacttcctactcctcctgttagaattacatgtataattgaattgttgtctttcattcttttttaaataaaaaaaggaatttatgcactatagcctgctatcagctatagtacctaagactccttttacatcgtataataaactattttctttctgcaactctgaaaaatccagatttaaaaattcagcatgtgctactccaagtacaatagcatcaaatttttcttttggtacagaattaatagtttgtaatttgtattcttctttaacttcctctatactggctaaaggatcatataatgtgactgttattccgtattcttttaacgctttgattacatcaacaatctttgtatttctaacatccggacaattttccttgaaagtaattccaagcattaacagattagctccattaacagaaattcctttttttatcatcagttttaccacctgagcagctacatactctcccatactgtcgtttaaacgtcgtcctgccaaaattatttcaggatgatatccaaattcttgagctctctgtgccagataataaggatctacaccaatgcagtgtcctccaaccaatccgggtttaaaaggtaaaaaattccattttgtagaagctgccgccaatacttcttgagtatcaatatccataagattgaatatcttagctaactcgtttacaaaggcaatattaatatctcgttgtgaattctcgatcactttagctgcctccgcaacttttattgaaggagccaaatgtgttccagcagtaattacacttttataaagcgcatctactttttgaccgatctccgcagtagaccctgaggttacctttagaattttctcaacagtatgttctttatcaccagggtttattctttcaggcgagtatcctgcaaaaaagtcttcattgaattttaatcccgaaaccttttctaaaactggcacacactcttcctccgttacaccagggtatacagtcgattcgtaaatcacaatatcccccctttttaacactttaccaactgtttcactagatttatataacggagttaaatcaggacgattatttttatctaccggagtaggaactgttatcacaaaataattacaatctgcgatatcttctatagaagttgtgcagtacaaccctggtttgtcatcagaattatcgaccaaaaccttctgtaaagtctcgtcatctatttccaatgtagtatctgtacctgatttcagagaagcaactcgcccttcattgatatcaaaacctacaacggcaaattttgtagcaaataatctggccaaaggtaaaccaacataacctaagcctataacggctatctttatgttttcatccaatttgtattcttttttatccacttcagtcatttcaattcacggctccgcccttctgagtcacatttttttgccccagacaccctacatttattttcggcaaatatagtatattaagtcaagttaatcaatacggtttctcgtaatactaaaaaaacggactattaaaaaaaacttaattcaacaatcctctatcaatcagcatgcaaaaaattatattataaaaaaaacagagaaataaaatctcaaattaaagaattttaccctctgttttaaatgaaatagttaaactataactattttatttgtattttattttaagcacacatcccaaagattccaaaaccaatatataatgtgtatttgacacttcctgaactatcgcttcctgattactaaaagcgccggattctattttaattcgatctccagcctgaattgaagttactgatatatcgcttatatttggagctttcagacttgcttttatactattaatttcttcatcgcgaactatggccggtttccccaaccaaaacaaataacggactaccccggctatctgaaaaactgaatttcgatcaatatctttcaattgaacgaatacgtaagaattaaaaagagggacttcaactttcttctttctatctgaccaatctttcactttcgtaattaatgggcaataacattcaatccccatttgaatcagcctatccgcaactttcttctcccatttcggttttgtataaacaacataccaattcataattttcctttacaatgactaaaatctccaacatcctcactttcctattttctattgaatttcacttcaatatctttttcaattaggaaccaatcccattataaataaaaccaattgattctagtttttttgcatccaagatatttctaccatcgaaaaggaaggccggcttatgcatagaatcgtatatcttttgccaatcgtatgttgtaaactcgtcccattctgttaaaatagcaattgcatgagcatctttacatgcgtcgtaagcgctagcaaagtttgaaactgccagattgttctcttccactgacctcgtctctaaataatttagatcatttaatatcttaatctttgaaactttcggatcgtaaactgagatccttgcctgttcattaatcaaatcatccgcaacataaattgctgcagattctcttgtatcattggtgtcttttttgaaagcccaacctaaaaatgcaattttcttatcggctacagtattgtataaagtctgaacaatcttacttgagaatcttttcttctgatgatcgttcattataattacttgttcccaataatctgctacttcatttaatccgtaagattttgcaatatacactaaattaagaatgtctttttgaaagcaagaacctccaaaaccaactgatgcttttaagaattttggtccaattctgctatccattccaatggcacgggcaacttcattaacatcagcacctgttttttcacacaattctgacattgcatttatagacgagatacgttgcgccaaaaatgcatttgccgttaattttgataattctgacgaccacacattagtcgtcaaaattttttctttgtctacccagtttgcgtaaacatcaaccaatgctttaattgcttcttcaccttctggtgttgtatctccaccaattaaaattcgatccggattcaacaaatcagtaaccgcagtcccttcagccaggaattcaggattcgataaaatttgaaactgaactccatttcctgtattatccaaaatgcttttaatagcttccgctgtacgtactggcaaagttgacttctcaacaacaattttgttttccttggctacttttgcaatttgtcgggcgcataattcaatgtattttaaatcggctgccatcccctttcccttaccataagtcttggttggtgtatttactgaaataaaaatcacctgagcctcatcaattgctttttcaacttctgtcgaaaaaaataaattccttcctctggcctccgctactatttctgaaagccccggttcataaatcggaatattatccgtatttgggtcattccagtctataattctttgttcgttcaaatcgacaacagtcacttgaatatgtgggcatttttgagcaattaccgccatagttggacctccaacataaccagcaccaatgcaacaaatttttgtaattttcatttactatactattatcttgatctttaatttatttcaaattcttccaataccagcccacagcttccttcaatccttcctgtaaagaatatttagggtcatatcccagcatttttcttgctttatcaatacttgctaatgaatgtggaatatctcctggacgatttgccccataaactatttccacgtcagaaattttagaatcaaatgttactaagtactcctttaaataacctactaaatcatttaaagtgtttcgatcaccaaaagcggtattataaactgtatttatggcttccggattctgactcgtcatagccaattcattcatctgaattacattgtctatgtaagtaaaatctcttgaataatttccatccccattaatcacaggactttcatatttcattaactgcataacaaacttcggaattacagcagcataagctccattaggatcctgctttctaccaaaaacattaaaatatcgcaatccgatagtctctaatccataagttttactaaaaatctcggcatagagttcgtttacatattttgtaatggcatatggagacaaaggctttcctattacatcctcaactttcggtaatccctgagaatccccataagttgaagaacttgctgcataaataaaccttttaactttggcatcacgagaagcggtcagcatatttaaaaaaccggaaacattcacatcgtttgtcgtaataggatcattaattgatcttggaacagaacctaaagcggcctgatgtaaaacataatcagcgccttcaacagctgacacacaatcggcaaaatttcgaatatctccttcaattaatctaaaatttgaatttgaaataaaatcctttaaattatgacgatgacctgtcgaaaaattatccagacaaaccactttatacccaagtcctaaaaaatattccgataaatttgatccgataaatccagctccacctgtaatcaaaattgtatgttgttttgatgtactcatttgcttccacttattttttattgaatttactcaaaatcgtcttccaaacaccatgttttttctcttcatcgtgataaccgtttgcataagctccgtaaccgtatccataagccgctccatattttgccttattctcataaccatttaacacaatgctggcattattcagttcccctcttttaactctggtatttagcaatgtaatcatatcctttttggtataattttgccttactatataaagagttacatctgcaaactgtgcaagttctaacgcatccgaaactaacccaaccggaggtgtatccagaataatataatcatatttttgcttcagctctaggatcatctctctcatcacatcactcaaaattaactctgaaggatttggcggaattggccccgaaagtataacatcaagatttggaactcctgtatggtgtgtaatttcttctaaactattttgctttatgaggtaattcacaacaccgatttgatttttcaaattgaactcatctgccaatctcggttttcttaaatccaaaccaagaattaccgttttcttttcgcttaaagcaaatactgtagcaatatttatggagcaaaatgtctttccttcaccacttattgacgacgtaatcataagagttttcgaaccactcacctgctgtttcttgtataaaaactgtaaagaggaacgtatagctctaaatgcttccgataatgccgattttggcttgtctaataccgccaaacttaacgaatctttatttactccgatgataccaattaacggtatttgtgtcaatttactaatatcttcagtattctggatcgagttgttgataaagaaaattccaaaaacaaacagcaaaggaattaacatccctaaaaacaatgccaatacgtagtttacagaagttttcgggccaattaatcctcctccgatatcttttgcaggatcaataaaatgaatgtccgacaaattggatgcttttacgatctcagcttcgtttctttttttcaaaaattcagtataaatattgtcacttaagtcatattttctttgaattttcagcaactcctgttgttcttccggaagtttttttacagtactttctgcctgacctatttttgcatttaccatagccaaatctgtcagtaacgatcctttcgcagaagctatattttctaataaaacactttttatagcctgcatttgattatcaaaatccttgaaaatcttatcgctttttacggcgtaagccatttctgatctttgtgtagatagcgcaataagtttcgacacattcacaacaacatttggatcttcaatccctgctactgtaggagccggtagtcttgaatagtcgttgctattatttaaatacgattttaaagaattataatacgcaatttttcttgtgacctgatctttttcaacatcaaaatccattattttatccgaaaccttagctcctccagcttcaatttcgtaaatatttttatcttttctaaacgatttcaactcattacctgtttgcttcaattgcgtttccatagcaataagagtactatcaataaatcgaatagtatttgttgcaaactgattttttccgtccagctgaattttgattaacatttttactgtcgaattcaaatattcaaccatcctggctttattggtaccttgcatccccagagtcaatattgatcctcctttttcatcagcgttgacactcacacctctataacccgatactgttccgtcaaaatcattaaatctaacaaaatactcatttccagtataaaatcccggattatcatttatctgtaaattccagtttaaaaaaggaagcgtgacttgttctccagctttacaccttctcacatactctttaggctgaacggttgtattactataactcttattggaatacgtaattaatgaaactgaattactttcaaatggaattcgaatttcatattcagttggactcaaaaacttaatcccaattaatgtattagcgagctgcgcttttgttttgtcaattttcacgtaaaaaggaaccgcaccgtaagcatcaactaaattgtattttccctgaacaagataatcaatataaaactgtaatttatccacaaccagctcgttgtgtgatcttgattgtataacagttgtgattccgtttacctgatctgaaacaccaccccaattaaagactaaacttgtattggaggtaaaaaaaggatttcgttcttccttaattgaaaccatagtctgcattccgtaaattttttctttacgaatgtttacctgataagcaatagcaaaagctattatcagactgactaaaaacaatttccagtaactggcgattttcagtaagaatcccttaaaatcaaaatttgaatgattttcaaaaatggaaaaatctttaatatctaacatcttttgaatttaattttagtttttaagcaacaaatataccgttgtcgccaaagacaaaaccgtaataattgtagtaatagattctatccccgtttttcctgttccccaagatttttgcttaactggttttacataaatataatcgttaggctgtaaataaaaataaggcgatttcatcacatttatatccgtcaaatcgatatcctgcatctgaacacctgttggagtttgacgaattacagttaccgcttttctattacctgtaatggagatatctccagcatttgcaatagcttccataatatttacatgttcctgaaacagcgttttagttccggtactacctacttctccatttatggtatatctaaaacctgccaattttaccgtaacaaaaatattcgcttcacttttaaaatattcttccagtagttttttttcaattcgaacacgaatctcttcaagggtatacccaataacattaatttctcctaaaaccggcattctgatattaccatgatcgtcaaccgtaaatccattaaaatataaccctgattccgattttcctgttcccgaagaagcactctccgtagtattaaaaatcgaaactaacttaggatcaattgcttttatatcaatactcaaaacatcgtttacctgcagcctgtaaggcttagactccacagcagcaatatttttctgctctccggaattatttttatcctgtaaataaaccatgtctttaacaggaatacaagatgtaaatagtatgctaatcaatagcaggatataaaagcctttttttgtcattagtaaaattttatcgcaaatatagcttttcctttaatcttcagaaaatctaagcgttatttgggtttatttaattgtttttgaaagttttttcgaatggaacccgatgtaaaatacttcggccaagggtgatttcatccgcatattccaattcatctcccactgaaattcctcttgcaatggtagaaattatgatttccgattcggcaatttgtttatagatgtaaaaattagtggtatccccttccattgtagagctgagtgcaaaaataatttccaccacctttcctgcctttactttttcgaccagacttgaaacattcaattgactggggccaactccttcaattggagaaattttccctccaagtacatgataaattcctttatactgacccgtgttttcaatcgccataacgtcacgaatatcctcgacaacacaaatcgtttgatggtttcttgatgagttagcacaaatttcgcagactttggtatctgagatgttatgacaattttgacaaaatttaatattctcacgcatattcaatagagcctgagataaaaaaccggtttgttctttaggctgttttaacaaatgcagcactaatcgcaacgccgtacgtttaccaattccgggcaattgcgacatttcacttactgctttttctattaattttgatgaaaattccatgacgacaaaagtaatacattaatgtttcttttctgatccgattaaaaatgaattcctcaattttctgaggtcaaaaacaaaaaacttaatactgatttgtagccaataaaactaaagtacaggccacttctgccttgatattatttaattctaacaattgataaaattccggattctcagcccctggattaaaaacaactcttttaggctgtgcttctataatataattgtaatattcgcgctgacgggcaggatttaaatacaacgtaacagtatcaatattttttaccggaattgtttttgtatgaatcttcacgccggcaacttcgcctttgttctgaccaattgccaatacagtatgtcctttttcaaccagcatatttatagctttaaaagcgtaacgttccggttttgtagtagcaccaagaacaagtgttttcttatttctcattatttttaaatatactgcaaaagtaatcaaaaagaatgagcttattttaggttatctttttagaattaaaagcagtaaaaaacaatatccttacatgatcttagctcgaagttttaaaaaatgtctatttttacggcactaacctaaactctatggatttattcatttatttatttgccgcactgttttcagtattaaaccctatcggcaccgtgcctatttttgttggactgacacaacacgattctcaaaaagaacgttcccgaatttcactttggaccgctattaatgttggaatcattttattggtctcctattttatcggtcagtatgttttgactttttttggaataagcattgatgctttaagaattgcggggggaatcgtaattgtaaattccggtttttctttactttcaggaaaattcaataaaaaacgaggaatcaataaaaaaatcgaaacggacgcacaacaaagaaacgacatcgctttaacgcctttggcaataccaatgctcgcaggaccgggatcaatgtctctattaattgctttttatcaggagcaccacggaataaacgaaattataatttcatgttccgctatcctggcaattgcatttacaatttttgcaatccttaaaagtgctcattatttagcgcgtatacttggtgcttcaggaatcgtagctatttccagaattgtcggttttattgtaatttcaattggaattcaatatatcgttagctccatcatcaatattgttaaaggaaacctgatgtaaacacgatcaacatacatctaataaaaaaggggataaaacatagttttatcccctttttttatatttaaaaacctatttagcttcttggcaaaaatacttcagccatcatacagcgggcacttccacctccacaagcttcgatagtatccaaactggaacttaaaatttccgcatgattttctaattgtgcaatttgtttcggagtcagactctgatgtgccgatgcactcattacaatatatctcttatcatttgtacctcgaacttccagcatatttccggcaaaattatttacctgtgcttcggtgattagaataacttcctttttatccgcttttagattttcaagaaccattttacgttcttttttatcatcgatactatctgcacagataacagcgaatgtttcacccagacacatcattacattcgtatgataaatcaatttacgttctccgtcaaccgtttgaaaagcttcaaaaataaccggggcataatcaaaatcttcacagaattcgataaacagctcttcatctgcacgaggagacaaagcgcagtacgcttttgcatttgctctatccaaaagcagacttccggttccttctaaaaaatagccatcttcttctgccgatgtatagtcaactatatttgagatctcaaagccattctcttcaagcgtatctaaaatatcttcacggcgctcctgacgacgattctctgcaaacatcggatacagtgccacatctccattttcatgaaatgaaatccagttatttggaaaaatactatccggggtatcggtttctaaagtatcttcaataacagtgacatcaactccaactgctctgagtttctcaacaaaagtatcgaattcctgttgtgcttttgcatttaccgtacttggtaaaagtccgtctaatactttttgataataattatttactgccgtttgctcattcattctgaaagctactggccgaatcattacgatcgcatttgtagtttgtttcattttatatgttttttttttcatttcaagtttcaggtttcaagtttgtggaacctgaaacctgaaacctgaaacttttttagtctcttattaatggtaaagtggaacatctcaacaatccctcctgctttgcaatttctgcatatggaatttcctctaccataaaaccattagcacgcagccaattgttcagacgggtaaaattcttttcggaaactacaacattatcgtcgatcgaaaatacgtttgaaaacatattatacatttcgtctctttcgatatgaaacaaattttcttttccaaaaagattcaccagatacaaataatctgcttcttcacggaagcctctcttgtagataattcctttatcttttccaacaggctgaaaacagcagtcaaggtgtaaggcattgtcacgagcttctaatttagattttaccaaatcaaattctttgacaattttattcgggaacatttttcttaaatattcaacaccatgcatattagttcttgccgtaatgtaatctttataatcacttcctttataagttccaataaacacatgatcattccacaacattacatctccaccttcaatatgaacttcctccggtggacgaactacttttaacggatccatctggtcgattacgtattgaattgcatccaactcacgttctctgtctggcagaatattagatttcacaaaagtatcatctatcacaaaacctatatcacgggcaaaaatctgattgtaactctcaatcatttccggacgatatacttttacatcatatttttgaaaaacggcattaaaagcatccatttcgacaatcatatctttttcgattggataagtcccggctttaatatgttccaatgatttaggatcataagcttcctctaaagatggagttggcccattatgaactgcagaacccaaaactactgcccgcagtctagacgtttcgttctttatatttaattgcaacataactatattgtattttgggcaaagataaaaaaagcttcacaggttaagtgaagctttaatttttttttatttgtttgacttaaagtctctcaatggatgtccagtataaacttgtcttggacggccaattggctctttgttttcacgcatttctttccattgcgcaatccagcctggtagtcttccaatagcaaacattacagtaaacatatctgttggtatccctaatgctctgtagataattccagagtagaaatcaacattaggatataaatttcttgatttgaagtattcgtcttcaagagctgctgactctaattttttagcgatttctaaaataggatcttcaacacctaatgtatctaatacttctttagccgcttttttgattattttcgctctaggatcgaagcttttgtaaactctatgaccaaatcccattaaacggaatggatcatttttgtctttagcttttgctaaaaatttatccgtatctccaccatctttgttgatttcctccaacatttcaagtacagcctgatttgcaccaccgtgtaaaggtccccaaagcgcagaaacacctgcggaaatagaagcaaataaaccagcatgagaagaaccaaccattcttactgttgaagtagaacaattctgttcgtgatcagcatgaagaataaatagtttgtctaatgcatcaattacaattggatttgcagagtatggtcctgtaggcagtttaaacattaactgcataaaattctctacgtaaccagttgtattatcgtaataattcaacgggtaccccatagattttctataagtccatgttgcaattacaagaaatttacccattgttttacaaatggcctcgtacatctctttttcattttcaacatttactgcttttgggttgaatgccgttaaagcactagtcaaagcagacaaaacgcccattggatgagctgtttttggaaaaccgtcaatgatatttttcatttcttcgtttaccaaagtatgctttttaataccattttcaaattgctctaattccttagcagttggtaattccccaaaaattaaaaggtaagatacttctaagaaacttgctttttcagccaaatcttcaattgaatatcctctgtaacgcaaaatccctaattctccatctaagaaggtgatttcactcttacaagaaccagagtttttgtatcccgggtctaaagtaataataccagttaaatcacgtaatttgttaatatcgatagctgattcattttcactccccgtgattaccggaagttcaattttttgaccatctacttctaatgtagctatttttgacataatatatcggaaataaatcttataaaataataatttatcaaatctaatgaatttaagactaattaaaaaaagaatcctgctatgaatttgttaaaactccaaaaaaaaaccatccgccgtggcggatggtttaaattgaatatatataactcttacaattatttaattttaaaagcatttaagccaggaaaataagctgtacttcctaattcttcctcaattcttaacaattggttgtattttgccatacgatcagaacgtgaagctgaacctgttttaatttgcccacagtttaaagcaactgctaagtcagcaattgtattatcttctgtttctcctgaacggtgagacattactgaagtatatcctgcatttttagccatgttcaccgcagcaatagtttctgtcaaagtaccaatttggtttacttttactaaaattgaattagcaattcctttttcaattcctgtagacaaacgagctacgttagttacgaacaaatcgtcacctactaactgaactttatctccaattttatcggttaagtatttccatccattccagtcgtcttcatacataccgtcttcgatagagataattggatatttagcagccaattcagctaaataatccgcttgctcttctgaagttctgatttttccggtttctccttcaaatttagtgtaatcgtatttcccgtttacataaaactcagaagcagcacagtcaagtgcaatcataatttcatcaccgaaagaatatccagccttttcaactgccaatttgatagtatccaaagcatcttcagtacctccggccaagtttggcgcaaaacctccttcatcacctacagcggtacttaaacctctatcgtgtaatacttttttcaagctatggaagatttcagttcccatttgcatagcatgtgtaaaagaagttgcttttacagggaaaatcataaactcctgaaatgcgataggcgcatcagagtgagaacctccgttgatgatgttcatcattggtactggcaaagtgttagcagaaactccaccaacatatctgtacaatggtaaccctaattcgttagcagcagcttttgcagcagctaaagaaactcctaaaatagcattagctcctaatttagatttgtttggagttccatccaagtcaatcattaactggtcaattgtattttgttcgaaaacagaagtaccaactaattcttcagcaataacagtatttacattgttcactgcatttaaaactccttttccaagataagctttacctccgtcacgtaattcaacagcttcatgctctcccgttgatgctccagatggaacagctgctctacctaaaacaccattttcagttactacatcaacttcaatagtaggattacctctggaatcaagaatttgtctagcgtgaactttaattataatactcattatttttatttttttattaataaattatatttttttttcgaaattataaaaatatttaatagtaaaaacgtattctaaccaataaacgtctttatttattaactacatcgttttagcagcagcttcttttatattctcaacaaactgatcgaacaaataggaggaatcatgtggtcccggacttgcttcagggtggtattgtactgaaaaacaattcttattcttcatacgcatccctgcaaccgtttcgtcatttaaatgcagatgtgtaatctccaattcaggatgattatccaactgctctttgtttacagcgaaaccgtgattttgagaagttatttcacctttacctgtaattaaatttttcacaggatgattaattccacgatgaccattaaacatcttatacgtttgaacaccatttgccaaagcaattacctgatgtcctaaacaaatcccaaacagcggtttatcatttgctaaaatttcttttgccacttcaatagctccaaaaagcggatccggatctccgggaccattagacaaaaagtatccatccggattaaattctgccaaatctttatacgttgagttatatggatacactttaatataacaatctcttttagccagatttcttaagatattcttttttatcccaagatctaaagcagatattttgtaggtagcactttcatcaccaaaaaaataaggttcagtagttgaaacttttgatgccaactccaaaccttccatgttaggcacatttgccaattcttttttcaaatcttcaatcgaagtaccatcggtacaaataacagcattcatagccccattgtcacgaatataacttacaagagctctggtatcaacatcagaaatacaaattaagttttgtttcgtaaaataatcttccagacttccggaagcatcttctctggaataattaaagctaaaatttttacaaaccaaaccggcaattttgatgctttctgattcaacttcagaatcattaacaccataatttccaatatgagtattagtcgctaccattatttgaccaaaataagaagggtctgtaaaaatctcctggtatccggtcattcccgtattaaaacaaacttcaccaaaagtcttaccgctaattccgatagattttccgtgaaaaatagtcccatcactaagtaataaaatggcgctttgtcgtgttgtgtatttcattctttaatttgtattgttttttaattgtttcatgaaatccccaataggtttttcatttgtaattagatattttgcaaatttacttctttaaaagagtgcctccaagattttttaaaactttcctctataaaaataaaacctaaaaagtcagataagttaaattttaatttcactccaaaaaaatcaaaaaaaaaaggataaactaaaaattagtttatccttgatttctatagaatcattactttcataattattcagaagcttcagtagtcgtttctgcttcagctgctggagcttcaggagtaccttcagcttttttagctttaccaccacgacggctttttgcttttttaacttcttttttacctccattgtaaagttcattgaaatctacaagttcgatcattgccatatcagcattatctcccaaacgatttccaactttaatgatacgagtgtatcctcctggacggtcaccaactttagcagctacgtctctgaacaagtcagttaccgcatatttgctacgtaagtaagcaaaaacaatacgacggttgtgagtcgtatcttctttcgattttgtaattaaaggctcaacgaattgtttaagcgctttagctttagcaacagtagtgttaatacgtttgtgctcgataagagaacaagccatattagccaacatagcttttctatgtccagtctgtctgcttaagtgattgaatttttttccgtgtctcattgctattttaaatttaacccgccgtagcggattgaattattctttatctaatttgtatttagctaaatccattccgaaagttaaattcttcactgcaacaagttcatcaagttcagttaaagattttttaccaaaattacggaatttcattaggtcatttttattgaacgatactaaatcaccaagtgtatcaacttcagccgctttcaagcaatttaatgctctcacagataaatccatatcaacaagcttagttttaagcaattgtctcatatgcaatgactcttcatcatacgattctgtttgtgcaatttcgtcagcctcgagtgtaattctttcgtcagagaacaacatgaagtggtgaattaaaactttagcagcttcagtaagagcatctttaggattaatagaaccatcagttttaatttcaaaaactaatttttcataatctgtcttttgctcaacacggaagttttcaattgcatattttacattttttaccggagtaaaaatagaatctgtaaaaatagttccaattgcagcattctgttttttgttctcctcagcaggaacatatcctctacctttttcgattgttaaatcgaagttcaatttgattttagaatctaaattacagataacaaggtctggattcaaaacttgaaaacctgaaataaatttttgaaaatcacctgctgtcaattgatctttaccggaaacagaaattgtaactgcttcattatcgatatcttcaatttgacgtttgaaacgcacttgctttagattaaggataatttcggtaacatcttcaacaacacctgaaatagtagaaaactcatgatctacaccttcgatacgaacagatgtaattgcataaccttctaatgctgaaagcaaaactcttctaagtgcattaccaactgtcaatccgtaaccaggttctaaaggtctaaattcaaatttaccttcaaaatcggttgaatcgatcatgataactttatcgggcttttgaaaattaaatattgccataaatttcgactaagtcaattattatttgttgtacaactctacgattaattgttctttaatgttttctggaatttgtagtcttgcaggcacagaaacgaaagttccttctttaagatcattgttccaagtaatccattcataaacatgacttgaatttgacaaagaacgttcgatagcttctaaagatttagatttttcacgaactgctactttatcaccaggcttaaggtggtaagaaggaatatttacaacttcaccattaacagtaatgtgtctgtgagatacgatttgacgcgcacctcttctagatggagcaattcccattctaaaaacaacattatctaatcttgcttcacataattgtaataaaacttcaccagttactcctttagttgctgatgctttttcgaataaatttctgaattgtttttctaaaattccgtaagaatatttagctttttgcttttccattaactgaacagcgtactcagatttttttcctctttttttagccatcccgtgttgtccaggtgggtaatttcttttttcgaatgatttatcatctccgaagattgcttcgccaaatttacgagcgattttggttttaggaccagtatatcttgccattttaaaaaaaatttaaggtagagattatgaattcaggtctaatccttcgataatctatgctctaccttgtttatactatgaataaataaaattaaactctacgtctctttggaggacgacatccgttgtgaggcattggagtaacatcgataatctcagtaacttcaattccaccgttatgaatagaacggatagcagactcacgtccgtttcctggtccttttacataaactttcacttttttaagtcctgcctcaagagctactttactacaatcttctgctgccatttgagctgcatacggagtgttctttttagaacctctgaaacccattttaccagctgaagaccaagaaataacttcacctttcttattagtcaaagaaatgataatgttgttgaaagtggcagaaatatgagcttcacccgttgattcaacgataactttacgtttttttgcagttgctttagccatattacttattatttagttgcttttttcttgttagcaacagtttttcttttaccttttcttgttctagagttgtttttagttctttgccctcttaacggaagaccagatctatgacggatacctctgtaacaaccaatatccattaaacgtttgatgtttaaagaaacttcagaacgtaattctccttcaattttgtaaaatgaaactgcatcacgaattgctccgatctcgtcatcattccaatcttgaacttttttatcttggctaacttgagctttttctaaaatctcaatagctctactttttcctaatccaaagatgtaggtaagtgcgataacacctctcttattttttgggatatctacccctgctattcttgccataattatccttgtctttgtttaaatctaggattctttttgtttattacgtacaatctcccttttctacgcacgataatgcactcggcacttctcttttttactgatgctctaactttcatagtgaatttgctttaggctttaggctttaggctttaggcataagttttattgcttaatgcttattgcctattgcttacagctttttaatatcgataagtaattcttgcttttgacaaatcgtaaggactcatttccaatttcactttatcaccaggtaataacttgatgtaatgcatacgcatcttaccggaaatatgagcaattacaatatgtccattttctaactctacacggaacatcgcatttgataatgcttcgatgattgatccgtcttgttctattgctgattgttttgccataaatatattaagctaccgcttttctatttttaccagtcttcattaaaccatcataatgtttgtttaacaagtacgaattgatttgttgaatagtatctattgcaactccaaccataattattaatgaggtacctccaaaaaacattgcccaagattgttgtacatccataatacttacaacaatagctgggaacacagcaatcaaagcaaggaataaagatcctgggaaagttattaaagacatcactttatcaaggaagtctgaagtttcagctcccggacgaactccaggaataaaaccaccgcttctttttaaatcatcggccattttgttagtaggaacagtgattgcagtataaaagaatgtaaatacaataattaaagttgcaaatacaaaattgtaccaaaatccgaacatattactaaacgcaccaacaatagattgtgatgtgtctgatttagacaatccagctacagctgcaggaataaacataattgcctgagcaaagatgattggcataactcctgaagcgttaagcttaagaggaatccattgtctgttaccaccagctaaatcctgctcgtaatctccagttgtcgtacgacgagcgtactgaaccgggattctgcgtactgccattgtaagcaatacacaagaaatgattactaataaccacacgataatctcaataactaacaacattggacctccattgttattggtaactctggttgtgaattcttgtataaaagcttgcggtaagcgcgctaaaataccaaccataatcaataatgaaattccatttccaatacctttatctgtaattttttctccaagccacatagcaaaaattgtacctgtaactaagataataactgacgagaacaaaaattcaggtgaattaaagcctagtaagaatgcactaccaggcaatgttctgtacaaattatagatataagttggaccttgaaccagtgtaatagctatagtcaaccaacgagtgatttgattaatcttttttctaccactctctccatcgttttgaagtttttgcaaataaggaatcgcaattcccattaactgaacaacaatagatgcagaaatataaggcataatacctaaagcaaaaactgaagctttagagaaagcaccccctgtaaacatgtccaggatagatcctaaaccatttttagtttgtcccgctaaacctgttaactgagttgcgtcaattccaggaagcgtaacgtgtgcaccaaaacgatatactaaaagcaatcctaatgtaattaagattctatttttcagttcttcgattttccaaacattacttattgattcaataaatttcttcatcttaatagataagttatatagttacagcttctccaccagcagcttcgatagcagcttttgcagtagcggtaaatttgtgggcagttacttttaattttgctttcaactctcctctacctaaaatcttaacgatttcatttttggtagctagacgatttgctacgaaatctgtcatagaaacagaatcagtaatcacaccattgtctactaataattgaagcgtatctaaattaacaccttcgtattctttacgattgatgtttgtgaaaccaaacttaggcacacgtctttgaagtggcatttgtcctccttcaaaaccaatctttttagaataaccagaacgagattttgctcctttgtgacctcttgcagaagtaccaccttttccagaaccttctcctctacctaatcttttattttgattgtgtgttgacccttcagctggttgtaagttacttaaattcataacagtatttgttatttagcttcttctacagaaactaagtgtttaactttgtttatcatcccaaggattgcaggatttgaatcatgctctacaacttgtcccattttacgtagacctaaagcttccaaacctcttttttgagaaagagggcagttgattttgcttcttacttgttttactaataatttagccataatttccttgaattaacctttaaaaactttttctaaagaaacacctctttgttttgcaacagtatgagcgcttctcatttgtaataaagcatcaaaagttgcttttaccacgttatgaggatttgatgatccttgagatttagataatacatcgtgaatacctactgattcaagaactgaacgaacagctccaccagcaataactcctgtaccatgagaagcaggaattaagaatacacgtgcaccaccaaatttacctttttgttcgtgaggaacagattgtccgttcaaaggaattttcactaaatttttcttagcatcttctactgctttcgcaattgcttcagaaacgtctttagattttcctaatccatgaccaactactccgttttcatcacctacaactacaatagcagaaaaaccgaaagctctaccaccttttgtaaccttagtaacacgattaacacttaccagacgatctttaagttcaagaccacttggttttaccaattctacatttttgtatttagacataatatattagaatttaagtccagccgctcttgcgccttctgctaatgatttaatacgaccgtggtataaatatccacctctgtcaaaagtgatggtatcgatcccggcttttaacgctttctctgcaactagttttccaacagcagcagctacttcaacgttagtaccttttcctatttctttttctcttgaagatgcagctaataaagtaactccatttacatcatcaataagttgagcgtaaatttctttgttacttctaaatacagatagtcttgggttagcagcagtaccactaatcgattttctaattctgaatctaattctctgtcttctatcagattttgttaatgacataatcttattttttaagctgatttacctgcttttcttcttaatacttcacccacaaatttaacaccttttcctttgtatggctcaggcttacggaaacctctgattttcgcagcaacctgacctaaaagttgtttatcaaatgatgttaattttacgatagggttctttcctttttcagatattgtttctaaagctacttctggagcaatttctaaaacaatattgtgagaatatccaagagctaaatctaacttttgaccttggtttgaagctctataaccaactccaactaattcaagttcttttgtaaaaccttcagatacaccaacaatcatattactgattaaagatctgtacaatccgtgttttgctctttggtctttatgatcagacgatctttcaacttgtacttgatcgccttcaactgttacagtaacgtccgaaaactcctgagttagttgacctttttttccttttactgtaatgataccgtctttaacttctacagttacgtcagcagggattacaattgggcttttacctattcttgacatcttatttagtctttaaaattagtatacgtaacaaattacttcaccacctacatttaattgtttcgcttgttttccagtcataagaccttttgaagttgaaacaatagcaattcctaatccgttaaggattcttggtaatttggcagcacctgcgtatttacgtaaaccaggtttactaattctttggatatctttaattacaggctctttagtatctttatcatacttcaaagcgatcttgattgaaccctgaacagagttgtcttcaaatttgtaactcaagatataaccttgatcaaataagatcttagttatttctttttttagattagaagctggaatttcaacaactttgtggtttgcagccacagcgttacgaactctagtcaaataatctgcaataggatctgtatacatatgtatttgattgcgattatggttttcgggagacacccgtctcccgaacctttaatcaattaaaattatttttcggtttgcaaaagtaataacttattgcgagattaccaagaagccttttttactccagggattaatccattatttgccatctcacggaaagttacacgtgaaataccaaattgacgaatataacctcttggtctacctgttaatttacaacggttgtgtaaacgaactggtgaagcatttttaggtaatctttgtaagccttcataatctccagcttctaataaagcttttcttttttcagcgtacttagctaccgttttctctcttttcacctcacgggctttcattgattctttagccatgtcttaattctttttaaaaggtaaacctaattcagccaataacgactttgcttctttgtctgtttttgcagtagtaacaaaagtaatatccattcctgaaattttgtttactttgtcaatatcaatttccggaaaaatgatttgctctaaaactccaaggttgtaattacctcttccgtcgaaaccagtagctttgataccactaaaatctctaacgcgtggtaaagcagaagtaataagtctatctaaaaactcatacattctctctccacgtaaagtaacttttgctccaataggcatcccttttctcaatttgaatgacgcaacgtctttctttgaaattgtagatactgctttttgtccagtgatctttgttaactcatcaactgcatagtcaataagttttttatcagatacagctgcaccaactccacggctcaaaacgattttttcaagtttaggaacttgcattacgtttgtatatccgaattcttctttaagagcagagattactctactcttatattcttcttttagtctaggtgtatatgccattactatagtacttgattagatttttttgaaaatcttactttcttatctccttctactctaataccaactctagttgtttccttagttttaggatcaattagtgaaatgttagatatttgtatagaagcttctttcttaacgataccaccttgagggtttttagcacttggttttgtatgttttgaaaccatgtttacaccttcaactatcgctttatttttctcacggtaaacacgtaatactttaccttcagcacctttatggtccccagcaataactcttacgatatctcctgatttaatttttagctttatcatcttaaaacgaattaaagcacttctggtgctaatgatacaattttcatgaattgtttttcacgaagttctcttgctaccggaccaaaaacacgtgttcctctcatttcccctgcagcgttcaaaagaacacatgcattatcatcgaaacggatataagaaccatcagctcttctcacttcttttttggtacgtacaacaactgcagttgaaacagctccttttttcacgttaccgtttggagttgcatctttaatagatactacaatcttgtcaccaacagaggcataccttcttttggtacctcctaaaacacggatagttaaaacttcttttgctcccgtgttatctgctacttttagtcttgattcctgttgtaccataattatttagctctttctaagatttcaactaatctccaacattttgttttacttaaaggacgcgtttcgctaattcttacagtatctccaatgttacagtcgtttgtttcgtcgtgtgcaacatatttcttagttttcaacacgaacttaccgtataatgggtgttttacttttcttacttcagcaataacaatagacttatccattttatttgaagtaacaacacctattctttcttttcttaaatttcttttttcttccatctttcagcagaatacaattattgtaactctcttttagttaactctgtagccaatcttgcaactgttcttcttacacttctaatttgaagtgggttttcaattggagaaatagcgtgagccatttttaggtcagcatatattttcttagtttgactaagtttttcttgcaactccgctgcagaaagatcttttatttctgattgtttcataatataaatttaattatgcttcgaaatctctagcaacgacgaatttagtttttactggaagtttttgcgctgcaagacgtaaagcctcttttgcaactgacaatggaactcctccaacttcaaacataattcttcctggtttaacaacagcagcccaatactcaactgctcctttacctttacccatacgtacttcaagaggtttcttagtaataggcttgtctggaaatattttaatccataattgtccttctctcttcatgtaacgagttgcagcgatacgtgcagcttcgatttgacgagaagtcaagaacattccatcttcatgtacagatttaataccaaacattccattagaaagttcatgccctctttgagagttacctttcatcttacctttttgtaccttacggtattttgttcttttaggctgtaacatttttctttagtttaaaaatttactttcttttacgagcgtctggttttccacctttattaaaaggctttctgtctcctcttggagaatcgccacctttaccaccaccagttccagattgttttttatccattcctgcaagtggagaaagatctctctttccataaacttcacctttcatgatccatactttgatacccattctaccgtaagtagtgtgagcttcagccaaagcatagtcaatatcagctctgaaagttgatagaggaattctaccttctttgaaaccttctgaacgcgccatctcagcaccattcaaacgaccagaaatcaaaactttgataccttcagcgttcatacgcatagaagcagcaatagccattttgattgcacgtctgtaagaaatacggctttcgatttgacgagcgatgcttgtcgccacaagataagcatctaactcaggtcttttaatttcaaagatgttgatttgaacctctttgtcagtaactttcttaagttcttctttcaacttgtctacctcttgtccaccttttccgataatgataccaggtctagcagtagtgatagtaacggttacaagtttcaaagttctctcgatgattactttagatacactagcttttgataaacgagcgtggatatactttctgattttgtgatcttcggcaagtttatcaccgtagtcatttccaccataccagtttgagtcccaccctctgatgataccaagtctatttccaattggatttgtcttttgtcccatgctgcttaagaattgctttgtgtgttattgatagctccaagcacgattgtaacgtggttagaacgttttcttattctgtgtgcacgaccttgtggagctggacgaagtcttttcaacatcattccaccatctactctgatctctttaacaaataatccagcttcttctaaattaccttcactatttttttgctcccagttgttgattgcagataataatagtttctctaattttcttgaagcttctttagaactgaatcttaagatgttaagtgctctttctaccttctgacctcttaccaagtccgctactaagcgcatttttctaggtgaagtagggcagttattcaattttgcgaaagcaatagacttattagcctcttttctcgcatctgctgtttctcttttacgaactcccattgcttcttattttttacctttattttttgctccagcatgacctctaaaagatctagttggtgaaaactctcctaatttgtgacctaccatgttttctgttacgtaaaccggtacaaattgacgaccgttatgaactgcgatagtttgtccaacaaagtctggagtaatcatggaagctctagaccaagtctttactactccattttttccgctttcaatgttttcctgaactttcttgtctaacttataatgaacgaaaggtcctttttttaatgaacgtgccatatcttattatttctttctacgttctacgatatacttgttactcgggtttttcttagaacgagttctgtaacctttagctggcaatccgtttcttgaacgtgggtgccctccagaagaacgtccttcaccacctcccatagggtgatcaactgggttcatcgctactggtctagttctaggtcttcttcctaaccatcttgttctacctgcttttccagatacaactaattggtgatcagaattagaaacagctccaattgtagccgaacatgttaacaagattaatcttgtctctcctgatggcattttaattgtagcgtattttccgtctcttgccattaactgagcaaaagttccagctgaacgagcaataactgctccttgtcctggacgtaactcaatacaagatataacagttccaagaggaattctgcttaaaggcaatgtattaccaatctctggttgagattctggaccagaaactaatttctgaccaactttcaatccgttttgagcgataatataagttttctctccatcagcataagctaataaagcgataaatgcagtacgatttggatcgtattcgattgatttcacagtagctggaattccaactttagttcttttgaaatcaataatacgatatctctgcttgtgaccaccacccgtataacgcatggtcatctttccttgactatttctacctccagagttttttatcggcgctatcaaagagcgttccggcttatcagttgtaatggcgtcataaccattcacaactctaaatcgctgacctggggtaataggttttaattttcttactgacatttttctatcttagatattgttgtaaaaatcaattgtttctccttcttgtacttgtacaattgcttttttaatagcatttgtctttccactgattaaaccacttttagtgtattttgtagttctatccggtcttacgttcatcgtgttaactgaaacgatagttactccataagcagcttcaacagctttcttaatttgaactttgtttgcttttttgtcaacaacgaatccgaagcggtttaaaacttcactttctttggttactttttccgttactataggtctaattatgatactcatattcctattatttacttaaattttcttcaattaactccaaagaaccttctaaaagcactaaattgttagtgtttaaaatagcgtaagtgcttaattctgagctagttacgacattagaagcctttaaattgcgtgacgacaaatatacatttttattcgactctcccaacacaaataaggattttttattctctaaccctaaagctttcaaaacgttaatgaaatttttagtgtttggcgcttcaaaattaaagtcttcaagaacgataatattcgactcttttgctttgattgagaaagctgattttcttgccaatcttttcaagcctttattcaatttaaatgaataacttcttggtcttggtccgaaaattgttccaccacctttaaacaatggatttttgatacttcccgcacgagctgtaccagttcctttttgttttttaatcttacgtgtacttcctgtcacttcagctctttctttagctttgtgagtcccttgtctttgattagcaagatattgcttaacatcaaggtatacagcgtgattgtttggttcaattgcgaatactgaatcagaaagttgaacttttcttccagtatcttttccgttgaaatctaatacttttacttccattacttctgaatgattacataagagtttttatgtccaggaacacatcctttaataacaagtaggttcttttcagccactacttttaaaactctaaggttttgaacttttacattgtctcctcccattcttccagccatacgcattcctttgaatactctagatggataagaagatgctcctacagaacctggcgctcttaaacggttgtgttgaccgtgagttgcttgtccaacaccaccaaatccgtgacgcttaacaaccccttgaaaacctttacctttagatacaccttgtacatctacaaattctccttcagaaaaaatagaaacatcaataagatctcctaatttttgctcagttgcaaaatcttgaaattcaacgacttttttcttagctacagttccagcttttttaaagtgacctaaagccgctttagtggaatgtttctcgtttttgtcatcgaaaccaagttgcaacgcttcgtacccgtcaacacctttggttctgacttgggtaacaacacaaggaccagcttcgattactgtacaaggaatgtttttcccgttttcgtcgaaaatactagtcatgccgatttttttaccaattaacccagacataaatattaattattaattactaaaattcccttcaatttgaaaataacagaaatttccaaacagggagtgcaaaagtagatattaaaattgaatataccaaacagttagaaaaattaaatagctcattatcaaaaaccaagcttcaaaacaacctcaaaaacaaccttgtttttttccaatactgaaatcattttttacattttcaactctttcacacttaacaattaattaataaaaccacaacaaaaaacactcgaatccccttaaaacaaaggactttatgaaaatttgcagaaaaattaaaaataaaaaaacctcaaaatcacatcgtaaaaaagcattattttaaaacaaaaaaaagcgagacatttctgactcgctttttatataaaaaatataaaaaaattatacttttatctctacttcaacaccacttggcaattcaagtttcattaaagcatcaatagttttagatgaagatgaataaatatcaatcaatctcttgtatgacattacttcaaattgctctctcgcttttttgttaacgtgcggagaacgcaacacagtgaaaagttttttgtgagttggcaacggtattggacctgttacaactgcaccagtagtttttactgttttcacgatcttttcagcagatttatctaccaacatgtgatcgtaagactttagttttattctgattttttgactcattttcttaagaattaagcgttaccttttgcttttttaattaccgcttctgaaatattagaaggcgtttctgcatagtgagaaaactccattgttgaagtagctctaccagaagacaatgttctcaatgtcgtaacatatccaaacatctctgataacggcacatcagctttaatagtttttgcaccatttctatcccccatatcattaacctgacctctacgacggttgatatcacctacgatatctcccatgttttcttcaggagtaataacctccattttcatgattggctcaagaacaattgcaccagcagctttagctacttctctataacccattctggcagctaactcaaaagaaagcgcatcagaatcgacagggtgaaaagatccgtctgtcaaagttactttcaaactatccacttgataaccagccaaaggaccagttttcatagcttcacggaaacctttttctacagatggaatatattctttaggaacgttaccaccttttacagcattaataaactgtaatccttttggaaccttaccatcaacttcatcagcaggctcaagtgtaaatacgatatcaccgaatttaccacgacctccagattgttttttgtaagtttctctgtgtgttgcagatcttgtaaacgcttctttatactcaacttgaggctcaccttggtttacttcaactttaaattcacgtttcatacgatctaccaagatatctaagtgaagctcacccatacccgagataattgtttgaccagaagcctcatcagttctaactgtaaaagttggatcttcctcagctaatttagccaaagccatacccattttatctacgtcagcctttgtttttggctcaatagcaataccaattaccggtgcagggaatttcatagactctaaaataattgggtgtttttcatcacacaatgtatctccggttttaatatctttaaatccaacagcagctccaatatctccagcctcaatatattcgattggattttgtttgttagcatgcatttggtaaatacgagaaattctttctttactaccagaacgtgtattcaacacataagaaccagcatctaaacgaccagaataagcacggaagaaagctaaacgaccaacgaacgggtcagtagcaattttaaatgctaaagctgcaaatggctctttaacatctggcttacgcaagattttagtttgatcttcttctaataattcagcatcatcaggatgaatcccttcgataccttctttatccattggagatggcaaatacttacatactgcatctaacatgaactgaacccctttatttttgaaagaagaaccagcaatcataggaatgatagccatatcaattgtagcagctctaagcgccacattaatttcttcctcagtaatagagttttcatcctccatgaatttctccaacaaattctcatcataatcagctactgcctcaataagaatcgatctgtactcttttacttctgcaaccatatcctcagggataggcacgatatcaaaagtagctccctgagtagcatcatgccaaacaatagcttggttttttactaaatcaacaacacctttaaaatcgttttcttcaccaattggcaaagtgatcgcaacagcattagatttcaacatatcacgaacttgttgacaaactgccaaaaagttagatccttgacggtccattttattaacaaaccccatacgtggaaccctgtattgatcagcaagtctccagttagtttctgattgaggctcaacaccatcaacagcactaaataaaaatactaaaccatccaatacacgcaaagaacggtttacctctaccgtaaagtcaacgtgtccaggagtatcaataatattaaagtgataaggcaatgtttcaggcaacgatttcccttgctcagttggaaaattccactcacaagttgtagctgctgaagtaattgtaatacctctttcttgctcttgagccatccagtccattgttgcagcaccatcgtgtacctcaccaattttgtgtgactttccagtataaaaaagaatacgctcagttgttgttgttttaccagcatcaatgtgagcagcaattccgatatttcttgtatattttaaatctctagccatttctttacgaattaaaatctaaagtgagagaatgctttattagcttctgccattttgtgagtatccattcttttcttaaccgcagcaccttcttctttagcagctgctaaacattctgacgctaaacgttgtgccatagatttttcatttcttcttcttgaataaagtattaaccacttcattgccatagaaatttttctgtctggacgaatctgcattggaatttgaaatgtagctccacctactctacggctacgtacttctacgtgaggcataacgtttgttaaagcatctttccaaatttctaatgaagttttctcatcattttgctttttagattcgatgatatcaattgcatcataaaatactttgaaagctgtagatttcttaccatcccacattaagttgttcacgaaacgtgttaccaattggtcattaaaccttggatctggtaaaagtggtcttttctttgccgctctttttctcatgtcttttttttaaataaaaagttataggttatccgttaaatgttatgtgttacagatttcaagcacatgcttaaagccccaacccttaactcctaacctccaactcttaacgttttaaattacttttttgcttcttttgggcgtttagcaccgtacttagatcttctttgcgttcttcctgcaactcctgacgtgtcaagcgctccacgaacgatatgatatctaacacctggtaaatcttttacccttccacctcgcactaatactatcgagtgctcttgtaaattgtgtccttctccagggatgtaagcattcacttcattaccatttgtcaaacgtacacgcgcaactttacgcattgcagagtttggtttttttggtgtagtagtgtaaacacgcgtacaaacccctcttctttgaggacaagaatctaaagcaaccgatttactcttcttagtgatctgagttcttcctgttcttactaattgttgaattgttggcataattaatactaaaaatttattatgtatattaaattcccgctttttacggggttgcaaatgtataaaatatttttcactatacaaacgttaattcattaattttcaataacattatttaagcatatgattttacaaacaaacaatagatatttgtaatacttttaatttaatgaaacaattgcttttgaaacaacttttacccctcctattttttctagtcggcatctcttcttatgctcaaaatcttcatttacaaattaaaggaacaaaccaaaccgaaacgcaaattattgattcactgaattactcagaaaaccacactaacataaaatcacttttcgaagaagttaaaaatgtatctaaaaaattaaccagacagggatatctcgaccatgttatacttgaaacaaaaaaaacaaacgatagtacttttatctccaaaatcgatttaaaaagcaaaacaaaagaagtccatatatatataggaaccaatcacagcttttttgatgaagcaaaaatcaaaaatgacactttaattctagcatatgaagagttggaaagctatctaaaccaaaaaacattagacgccgaaaaagcaggtttcgccttaaacaaactaaaacttgaaaacctacaaaaaaagaattcaattatttacgcggagttaaactataaatccgaaaaaaaacgcatcgtaaattccattattctaactcagactgacctgacaaaaagagattattttccaaaagggcatctaaaacagcttaaaaagaaatacctaaacaagactttcaatcaggaaaccataaaacaattgtataacgacatcaatgcatttgaattcacctctcaaaccaaatatcctgaagtattattcacaactgattctacaaaaatatacacttatgtagaaaaaagacaagcgaacacttttgatggctacgttggtttttctaatgacgaaaataaaaaaacaaccctgaatggttatctggacttatccttattaaacactcttcacgcaggagaacaattttcactatattggaaaagtgacggaaatcagcaaaaaaccttcaatactaaaattgaaatcccctacatatttcaatcctcactgggcatcaaagcacaattaaacattttcaaacaggacagtacttttcaaaacaccaaaaccgctattgatctgggttattttttaaactacaatacacgattatacctaggctatcaatcgacagaatcgagcgacattcaaaacacaaacaacaccacaataagcgactacaaaaattcctacatcacttctacacttgagtataaaaaaacagattatctccaaagtttattctccaaaaaagcctctcttaaccttcttttgggctatggaaaaagaaacaccaacaacagccctaacatcgtcgaatccagcaaacaattctacaccacccttaacctctcttataattttgaactaaacaagaaaaacttcatctacataaatccacaaattctttatctgaaaagtaaaaactacattaccaacgaattgttccgatttggaggaacaaactctattagaggttttgcagaaaacagtcttcagggcaatttcgcctctatgttaatcactgaatacaggtacaaagtctctaacaacctgtatatcaattccattattgattttgccatttaccaggatttaaccaacagtcaaaatcttaataaattacaaaaattatcaggagtcggaatcggcacaaccatccagacaacaagcgggctactccgaattaatctcagcaatggcggggaaaatcttcaggaaattaaattatttaacacaattgtcaacatatgctacaatgttaaattttaaccttgtgagaaaattcaccaaatcaacattcgtattgttaacaaagtattaagaaattaaaactaccggaaaattccaaataataaagccgaatatatcagattaatctcagcaataacaggcaaaagacccaataaacccaattatttaacacaataattacaatatgttacaatgttaaattttaacattgtgagaaaattccacaacacaatactaggattattaacaaattattatgaatattgtaagactaattcaaaataattataaaaatgaaactaaagttcaatggatttttagtactacttttagtactattcgcgcaactaacctttgcgcaggaaagagccgtttcgggaactgttaccgatgacgcaggtatgcccctaccaggtgtaagcgtacaaatcaaaggaacaaaaaccggcacgcaaaccgattttgatggtaaatactccatcaaagcaacaacaagtcaaattttagtatttagctacatcggcatgaagactcaggaaattgccgccagctcatcacaagtaagcacaaagctatccggagacgcccagcaactggaaggagttgtcgtaactacagcgatgggtatcaaaagagaaaaaaaatctcttggatatgcttctcaacagatttcaggcaaagacgttaatggtggagccggaaacactaacgttgccaatttactatcaggtaaagccgcaggtgtggaagttcaaagaaacaacaactttggaggttctacaaacgttgtaatcagggggaacaaatctcttaccggaaacaaccaggcgctttgggttattgacggggtgccaattgacaactccaactccaacgtttcttcgcaacaagttggcggaggtggttacgattacggtaacaatgcctcggatatcaaccaggaagatattgaaagcatcaacatcctaaaaggagcagctgcaacagcattatatggatccagagctgcaaatggagttgtaatggttactaccaaaaaaggtaaatcagacaacaaaattggattttcgttctcaagcgggttcacaaatggaagtgtagacaaatcaacttttcctaaataccaaaacagatatggatcaggatatggcattggctcctcatttttaggaacaggcacacctgatacggtagacacatcaaatgatgcctctgacggagacgccttcgataaccaaccagtttaccaatgggatgcttttactcctttctcgccaaactacggaaaagctactccatggacggctgcaaaaaatggccctgtaactttctttaataatgcacatacattcgttaacagtatcgcattagagaaatcaactgacagatccagtttatctctaacctatgtaaacaccaatcaaactggcattcttccaaacagtgaattgaaaaaaaatcagataagtgcaagatttagccaaaaagttactgataaacttaccgctaatgcctatgcagccgttacccttcaaagcactgtaggtagaaactcaaccggttataacgataacgttatgggtaacttcagacaatggtggcaaaccaacactgacgttcaagcgcaaaaagatgtttactttgcatcaggcggtcaaaacgtaacctggaactggactgacccgacagatccttcaggtctgacaccagcatactgggacaatccttatttcacacgttatcaaaattactcttctgatgacagaacccgtttattcagctacgcttccctaaattacgagatcgctccatggttaagtgcattaggaagagtctcacttgacacctataaacaacttcaggaagaaagaagagctgtcggatcaattgcttcaggatttggtctttctcccgttaatgaatcatcaggataccaaagaaacgaaatcgacttccaggaaatcaactatgatttcatgttaaacttcaacaaaaaaattggcgaagacattagtttaaatggagtaattggaaccaatatcagaagaaacaaaagagacaatgtactttcttcaaccatcggaggtttagttacccctggaatttatgccttatctaactcacgtttagacttaccattcccaagagaagccaaaatatcctcaggtgttaatggtatctacgctcaagcatctgttggctatttagatacttattttgtagatgcctctatcagaagagatgtttcttctacattacctgacaataacaactcttatgtttatcctgcagtttccggatcattccttttctcaaacgtagtaaaggcagactggttaaatcttggaaaattcagagtaaactatgctgaagtaggaaatgacgccgatgcacttcaactaaacaatacctatacaagagttcctaactttcaaggacaacctctttatacaaactccttattgcttccattccgtagcatcaacaaaaatccagaccttaaaccggaaagaacaaaatctttcgaggttggtttagaaacaagtttattaaacagacgtctagggtttgacattacctactacaaaacaaactcagttgatcaaattgtggcagctgctgtttcttcaggatcaggattcacaaacgcacttgttaacggtggaaacatagaaaacaaaggttttgaaattcaattaaacggaactccaattaaaacaaaagactttagctgggaaataatcgttaactggtcaaacaatagaagtaaagttatcacattaccaaatggactagataatcttcaattaggttcattccaaggtggtgttacagtcaatgcagctcccggtgaagcttatggcgccctaaaaggaactgatttcgtttacacaaacggacagccaacaatagatcaaaccacaggtaaatacatgatcactacatcttcaagcaacacaatcggaaacattacaccggattggattggtggagtaagaaacaaatttacttataaaaatttaacttttggattcttaattgacactcaaaaaggcggagatatcttctctttagatatgtactacggacttgcatccggattatacaaagaaacagctgtaggagacattagagaaaatggtcttttaaatcctggagtagctcctaacggaactccaaacactgtaaaaacaaaaggcggatcaattgcaaacagcatgggatatcaagctgcgccaaacaaagcttttatatacgatgcctcgtttgttaaacttagagaggtatctatcacctacaacttccctaaaagcatgtttgaaaacacattcataaacgcggcatcagcaagtttagttggttctaacttatggatcattcataaaaacctaccatacgcagacccagaaagtggactatcatcaggaaacagctcaagaggctattcagttggatctcttccaactaccagagatattggttttaacttaacattcaaattttaatacagaacaaaatgaaaaaaatactatatgcattaggaatcatgcttctcacagtttcatgtgacgacagcagcctaacagacttaaatgtagatgtaaaaaacccttctgtagtaccccctagcactttatttacaaatgctgaaaaaaacttaacagagcaacttgtcaacaccaatgtaaacagaaacatattcagactagtaaaccaacaatggactgaaaccacctatctggatgaatctaattacaactgggtaacccgtaaaatttcagacaaccactgggacagactttatgcaggaccacttgctgatttatctcaagcgaagggctttctggaaaaagatgtaatctcacctacagatccggaatttgcacaaaaaactataatcaaaaagaatcaattgatccttattgacatattaatggtttatacgtaccaaattttagtagacacttttggcgatgtcccttactcagaatccctaaaaggatcggaagattatctgcctaaatacgataaagccgtagatatctacaaagacttaatcgtacgtttaaacaaagacatcgctggattagacacctcaaaaccagcctttggctctgccgaagttatctacaaagacaatctaactgcctggattaagtttgccaatagcatcaaactaaaactagggatcaacttaaaatcatctggacttgaatcagcaattgcagacgcagcaatcatctccggcgcagcgggcggattttcatcaaatgctgataatgcaaaacttccttatatgttaaatcttccaaacaccaaccctctttatgtagatatggtattctcaggaagaaatgactttgttgtagcaaaaccctttgtagacaaattggtcgcattaaatgatccaagaaaaacaccttacttcagaccaacttataaagatacaaatgccgcaggtgacttaatcactgtaacaggttacagaggcggaattgttggaataaaaaactctcaatcaagatacactcatgcaagtgacaaaattaaagctccggactttagtggtactttattggattatgccgaagtacaatttttactggcagaagcagtaggtagaggtgtagctgttggaggcactattgcttcacattacaatgcagcaattctagcttctatggaagactggggagtttcgccggcagatgcaaacgcctatcttgctcaaccagccatagcttatgcaacagctacaggaacctggcagcaaaaagtaggagaacaggcatggtatgcattgttcaacagaggatttgaaggttggacatccacaagaagactagacttccctgttctaacagcaccagcaagtgcagatgcagctgccgaaggtaaagtaccatccagaatggcatatccaattagagaacaaacattaaatgcaacaaactatactgctgcatcaacttcgattggaggagacaaactaagcacaaagattttttgggataaataggaaataccaaaaaataacataatttaacacaaaaccacctcctttcggggtggtttttttgttgaaaacgcagaaaaaactgaaattcatcatccttccaataaaatttaacatttaattcagcagacacaaactaaactatccattgctttttaagtaaaaaattgataattcactatttttgaatgcattttaacgataaaaaaataactcctgtcagcaaaaatgccgtttcactgaaaaaaaaacttttttgattaggtatattaactaattattaagatttttgtcggactaattcaaaatatttaaaaatgaaactaaagttcaatggactcctagtacttttcttagtactagttgcgcaacttactttcgcgcaagaaagagctgtttctggaacagtttctgacaatgcaggaatacctttaccgggtgttagtgtattagttaaaggaacgaagacagcaacgcaaacagattttgatggaaaatactctatcaaagcagcaccaaatcaagtattagtttttagctacattgggatgaaagcccaagaagtatccgctagttctactactgttaacacaaaattaaaagacgattcagtagaattggaaagtgttgtggtaacggcattaggtgtaaagaaaagcgcacgtgcacttggatatgcaactcaggaagtaaaagcagcagacattacaagagcaaacaacaacagtcttgctggagctttacaaggtaaactagctggtgtacaaattactccttcaagtggtgctcctggagcttcttctcaaattgtaattcgtggtgcccgttcattttcaggaaacaatacacctctatacgttattgacggtatgcctgttgcttcacaagcggacttcagcactggaaatggagttagtggagcagacgttgccaacagagctgtcgacattgatccaaatgagattgagtctatcaacgttcttaaaggacaagctgcatcagctttatatggtcttagagcctctaatggtgtgatcttaatcactacaaaaagtggaaagaacttagcgcaaagcggtaagccaactatcactttcaatacttcaacaagttttgaaaccatttcaaaaaaaccgcgcactcaaaatgaatacgctcaaggttcaagaggagtttacgatccaactcaatctttgaactggggaccaaaaatctcagaattaccaaacgaccttacttatggaggaaacgttgccaacgcaatcaatggtggagttcttagacctggtaaatactatgtgcctcaaagagcaaaagctggactagacccatgggttactcctcaggcttatgacaacatcaatgattactttaacacaggatttacaatcaataatacgttaaacatttctcagtcaacagaaaaaacaaattattcttttggtattggaaattctaaacaagatggtatcatccctgaaacaggaatgaacagatacacagcaaaagctgttgttgacactaaactaaacaatgaatggaaaactggtttttctttcaactatgtgcaaactaaaatcaacaaaagtacatctgcaaatgacggtgctattgttggtgtatttggagctccaagaagttatgatttaaagggaattggttatgctaatccactaaatgcttatgatcaaattcacttcagaccaactacttttaacaatccttactgggctgctaaaaacaacgagttcagcgaaaaaacaaaccgtgtttacggaaatacttacattcaatactctccagttattagtgaaaacggaagccaaaagttaaccgttaaataccaagctggtatagattcttggactaccaattacagagatatttttgaatacggaaacaaacaagatttaacaggtcaaagtagtagtgcaagacttcgtggtacaactaacgatgtaatcaactctttactaacagtaaattacaacttaaacattacagatgatttcaatttgaatgtattagttggaaatgaatacaatcatcaaaacactaaagaatatgacgatcttggaactgctctaaactttggtggttggccaacaattggtaacgcaagaacagtaactgcaagcgaataccgtagacaaatccgtacagtaggcttctttagtaatgctgaattctcttacaaaaacatggttttcttaagtggtactatccgtaaagacattgcttctaacatgccaagaggaaacagatcttttatttacccatcagcctctttaggatttgtactaacagaactagaaggattaaaaggaaaatctttcctttcatatgctaaacttagaggatcgattgcagaagtaggacaagcaggaaattacgtaggtaattattatgatgcacctgattaccgtggaggtttctggtcaggatcaccaatcaattatccattatcaggaggtactagctcatatgtaccaagcaatttattatatgatccaaacttaaaaccgcaaaacacaaaatcatacgaagttggagttgatttgaagtttttcaacaaccgagttggacttgattatacgtactctgaacaaaattcaacaaaccaaatctttaacgtaccattagctggttctactggagcaagtgctcaagtaacaaatggtggaaaaatgcttaacaaagtacacgaaataactttaagcactaatccaattcgtacagcagatttcaactggacatttaacgcaaacttctctaaaatagattcttacgttctatctttaaaagaaggtgtagacaacatctttttaggaggatttactactccacaacttagagctagtgtaggagatcgtttcccggttatttacggtgcaggttaccttagagatgctaacaacaatattgtagtcgacaaagatggtcttcctagagctggtgctataaaagcattaggagaagttgctcctaaattcatcataggaggttctactcagtttacctacaaaagagtttcattgggagctgttgttgattggaaaaacggtggaaaaatgtatagcggatcaaacaatacgatgaacacttacggtgtagatgcgagaactgcagacagaactacagaatttgtataccctggagttaaagatgacggaactcaaaatgatattgttataggtggtacaagagctaaaacacaacaagatctatattcaactttaagcggaattgctgaagctggtatttttgatgcaagttttgtaaaattaagagaagttacattaggataccaattccctaaattactaaacaacacagtagatcttaaagcttctgtttttgcgagaaacatccttctttggtctaaaatgccaaaccttgatcctgaagcaacacaaggaaacaacaatttctctggtggatttgagcaatggacaatgccacaaactaagagtattggttttggactgaactttacattttaatctaaaaaaaatcaaatgaaaaatttaaaaataacaataacagccgtaatggctttattcttattccaatcttgttccgaagacaaaatggatgagataaataagaatataaacaatccgactgaagttgctgcccgtttcatcattactgatgtaatggtaaactctgcttttgctgtaaccggatcggatgcatcattctacggaggaatatattctgagctaaatgcaggaagccatggccaaatgtatgaagcacaaattagaagaaacgacccacaactagcttccacttataacaataactggaataacagctacgaacaactacgagcattgaaggtaatcgttgagaaatgtactacaggaaatgaaaaagataactatcagactcttggtgtagctcaaatattattagcttataatttagcagttcttacagatctttttggagatatcccttatactgaggcattaaaaccaggagtaatctttcaacctaaagttgacaaacaagaagctatctattcagaagtatttaaaaatctaaaagaagggattgccaatctaaacaaaacctcagcttacgcaagtttaggatcacaagacgtaatttacggtggagtttcttcaaaatggatcaaagctgctaatgggttaatggcaagatacacgatgagattatctcttagaaaagcagattatcaaggtgtaattgactatgtaaatgcttcttttgcagatgctgacaacgaatttaaagttacaaacagcagtgtcccaaatccttatgcaagattcaatactgacagagctgctataagtgtagcaaaaagcttctatgacaccatgcttgcaaatggaccagctgatgctcgtactgctgcttctttcacaagaattagcggtgctgtcaagccttttaataattcaatcatagacaaagatgggcaaagattatattctatctcggctttcataaacgaaagaaaccctatttacttgttaagctaccatgaattactattcctgaaagctgaagctcaggctagattaggtttacctgaagcacaggctactatgaatgatgccattacagcggcttatactaaaaaacaagtagttacttttacagcaggtcaggctaatacgtatattgcttctataggagttttaacgggtgatgctttattgaaaaagataatggtagaaaaacatatttctttctatgaaaatgaaggtatcgaatcttataacgacattagacgtctacaagcaatgggtaacggaagttttattcctatggtaaatcctaaaccggaattattcccacaaagatttgcttacggccaatctgacgttgtttcgaattcaaacgttaaagaactatacggagacggtacttacgtatacaaagaaaaagtttggtgggctggaggtactagataatagtatttttcacttgcaaaacaactcctaaaaagggcgcttatcatatgatgagcgccctttttgtcatgaataactttgctaaaactataaaaaaacaaaactcaaacagctagtcccttaaaacacaataacttatttgacaagagatctttctacaaattaattttcacaacttacttctcaatataaaaaaaatcaaagattcattttttttgctttatcagactattgcaacaaaatagcgtctaactttttggggttgttcatatcaggatgacctcttttttattttcaaaatgacaaaggcaaaagtacactcaaaaaagcatcttataacatggataaaaatcatgaaaaccctagcaaaatcaagcattaacacatgttaaataaaaaacaaacaagacaatattaacccttactttttaacattaaaaaaacacatctcacaacaaaactgcaaaatgaacaaaaaaaaagctttttatattaggtagattaacaaataattaagatttttaccagactaatccaaaacacataaaaatgaaactaaagttcaatggactcctagtacttttattagtactagtagcgcaacttacttttgcgcaagaaagagctgtttctggaacagtttctgacaatacaggaatgcctttaccaggtgttagtgtattgattaaaggaacaaaaacaggaacacaaacagactttgatggtaaatactctatcaaagcttcttcaaaccaggttttggtatttagctacattgggatgaaatctcaggaactagctgctacttcaacttctattaacataaagttggccgataattcggtggaacttgaaagtgttgtagtaacagcgttaggtataaaaaaagcagataaagctattggttacgccacaacaaaggtatccggaaatgaccttaataaaggaaacagtcaaaaccttgtaaatggtcttagcggaaaagtttctggtctacaagtaactgcttcaggaggtgctccaggtcaggcaagtagattagtaatcagaggaggaaacaaatcaataacaggaaacaatgaacctctttatgttattgacggaatcccaatgagtaatgccaacgacggtaacgaaaatgttgtaacaggatttaacagccccaacagagcagccgatatcaacccaaatgatattgcaactgtaacagtacttaaaggtgctgccggagccgtattatatggaaatcgtggttcgaatggtgttatcttaattaccacaaaaacaggttctgataaagcaggaaaacctgttatcgaattcactagttctgtaggtgtggataacgctcttgttttacctgattttcaaactgaatatgcacagggagcgaatggtgtataccaagaaggaggatctagatcttttggacctagaattacaggacaaactgtgacaagtcctgctgcaggtgctgcattaggattaggcccacaacaaattcagttaaaagtatttgatccaagaaaacaatttcttcaaacgggagtaacctacaacaataacatatctctttcaaattcaacagatgcctacgatatgtttgtatctatcggacaatcaaaacaaacttctattgttcctaatcagggataccaaaaattcaatggtcgttttaacagtaactataaattcagtagtaaatttactgccggagttaacctaagctacaatgcttctaaaggagatcttgcctatgcaggacaagacggatcaaatccatttttcgccttattccacgctcctgtttcatgggatttaaaaggctacggatatcaaagaccgaacggaacacaaattaacttccgtggaggagcctttgacaacccatactggactgctaacaaaaactcagcacgtacggatagccaaagatatattacaggtttaaacttcgcctttgacgtagctaaagatttcaaaatatcttatcgtcttggtaatgactatttagccgacaaaagaattctctttaaagacattaacactggaggtaatccattaggaaacttgacttacgataatgttactcgtcaagaaacaacttctacattagccgctacattcaagagagatattactgagaaattcaaagccattttaacagccgggcaagattacaataatagaacttttgaacaatcacaaactattggtactgaactaatacttcctggaattatcaatacaaacaatatcaagacattctctcctgcctatttatacaattcaagaagaaccttgtttggagtatttggtgacctgtctcttagctacaacgactatcttttcttaaatgtagttgccagaaacgaatggagctcaacattacctaaagacaatagaagtttcttctaccctggagtaagtgcttctgttatcttcactgatgcattcaaaatcgaatctgacatacttacttacggtaaactacgtgtaggtgtttcgaagacaggtagagatgctgatccatatttaacacaacctgcttacagaaaagcaatatttggagatggtttcacaccaggtgtagaattcccatttaataaccttgccggatataccatccaaaatacaattagtaatccaaacttaacccctgaattcacaacagaatacgaagtgggtgttgaattaaaattattcaaagacagaataggtattgacgcatcctactttagaaacgtaaatactgatggtattatcccgttagacatttctcctgcagcaggtgctaatgcaacaatcatcaatagtggacaaactagctcgaaaggttttgaacttatgttaagaacaacacctattcaaacaaaagatttcagatgggatgtgtccttcaacttcagtagaattagatcacatgttgacgaaacttatccaggtgtagatagaatttatcttggtggatttagtggaaacccagctatttttgctgtaaaaggtgaaagattaggaacaataatcggaaccggctacgaaagagacgcaaacggaaaggtattagtagacgacaatggtattccttctgtattagacggacaaattcttggtcatactgaagccgattggactggaggtctaagtacagctattaactacaaaaatatttatttcacagcacttgccgacataagacaaggtggttacttatacagtggaacaggtgaattattagatttttatggtgttagtgagcaaaccttaacacgtaatgacgactatattttccctggagtaaatgctaccacaggagctccaaataatgttgtggtgaaacgtgatgcaaactggtatggattaggcgcttatcctaatgaacaatatgtttatgaaaacaattgggttaaactaagagaagttactcttggatacactttcaagttaaaagataaatatattcgttctttggatttgggagtatatggacgtaatttatttatctggacagatgttcctcatatcgatccggaatcaagctcatttggaactggtaatgcacaaggtgtgtccagatttgcattcccaactacaagaacttttggtttcaacctaaaagcgcaattctaatactaaaattaatgaaaatgaaaaaaattgacaacaaatattttaagcgaatatttcatatcggcttaattacattggcggcggtatttgtatcttgtgaaaatgagttagacataaacaatgacccaaacaatccaacagtagttccatttgcaaccttattatcagctgcagaagttaatttagcttatactcttggtggagacggaacaagaatgcctgcaagtattgtacagcattattccggacatagaggacagcctttaaattacggacaatacaacatcacctcaggtgatactgatggtttatgggcaagcatctatgacatattaatcgacttgagatcaattgaagatcaaactaaaatcacaggggacaatatttaccttggagcttctcaaattcttcaagtttacactttcagcgtagcaacagatctttttggagacattccttatacccaaagtttaaagggggcatcaaatattactcctgcttacgacaaacaagaagcaatctacacttctttacttacgatattagatcaggcaatcgtaagcgtgaaaagcaatactggtgccaaaccaggaactgccgacttattatatagtggcgatgctacaaaatgggaagcctttggaaactctttaaaactaagattattaaatcaccttagtaaaagaaatccaggacaagcgttggcatttttacaaactaacccaaaactaattagcacaaatacagacaatgctaaagtagtgtttggaactactgcaaataatgcaaatccaatctaccaatttgatgttttatcgggtagaaaagatcaggccgtatgtagtacgattgtcaacaatatgaaagcactaaatgatcctagactaaccctatacttcttacctgttaaaaacaaccttgcaggactacaggggcaataccttggtaaccttccagggcaggatttagacgacgcaggagagaatttattttcacgcgtaggatcagcttatgcttcaattaactctcccgttactcttattagtgctgcagaagtagaatttgttaaagccgaagtttattttagagccaacgatttggtaaattcaaaaatagcttatgacaaagctataacaaatgactttgctgcaataggagctacaggtttagcaacttacactgctaacccattagttgcttacaacaatacattgcaaagaattatggaacaaaaatggatcacgatgtatcaagcttcttatgaatcttttgtagactggagaagaactggattccctgttttaactccccctacaactaaccgtactaacggagttactccaagaagattaccatatcctcaaaaagaaattaatgttaacggtgcttctttagctgctggtcctggtgttcccgttccttatgtaacatttttaacaaaagtatggtgggataattaatccttaaacctttataaatatactaaaccactctgttcactcagagtggtttttttttataccaacaatatacctatatttgtcacatggaaaaagaacatcaaatatttggaattagagccattatagaagccattcaggcaggaaaagaagtggataaagtatttattcaaaaagaaatttccggagaattaatgaaagatttaatgaaagtgatgaaacgcgctaacattaatttctcttatgtacctgtagaaaaacttaatcgattaactccaaataatcatcagggagcggtagcgaccatctcccctattggttttattgaactggaacatttggttgaatcgacaatcgaatccggatcaaaacctttatttttaatactggatcagatttcagatgccagaaattttggtgctattatcagaactgctgaatgtaccggtgtaaatggaatcattgtacaaaaagcgggttctgctccagtaaacggagacacggttaaaacttcggcaggagcggtattcaatgttccaatttgcaaagttgaacatatcaaagatgccattttttaccttcaggggtcaggtatcaaaacagtggctgctaccgaaaaaacagaccaaaatatatacgacgtaactttaaatgaaccggtagccatcataatgggatctgaagacagaggtataaatccttctgttctgaaaattgttgatgaaaaagcaaaattacctatgtttggatccattggatctttgaatgtttctgttgcctgcggtgcatttttatatgaagctgttcgccaaagaagttaaataatatatagaattgagaattacgatgacaaattaaaaacaaattaatgtcttccaaatatcctcaaaaactattctttcttaaaacctgtagcttaattgtagtagtgttacttacacctttaagctacgggcaaataaacatcctaagcccaacattacctatcctgctttgtctcaggcttagtcataatataattaaccgaaacatctgaattaaaataagtcattaattcctccggttcttcctcaacgatctccgtatttacgaaatttccattctcatcaaaatgcttcataaaagcatcttcattgggattaaaatccggtttttgccattcataaataataggttttgcatactcaggggttttgtaaagtaaagacataacaaatccagtgataaaacctgccaaatgtccttcccaggaaatagttttatccacctccggaaagacataccaaatcattccaccgtacaataagataacagataatgagagtgccactaaacgataatagccggtttggattcctttaaaaaaaataaaactgactaagacgtaaatcaatccgctggcaccaatatgaaaattttcacgaccaataatccaggtaattagtcctgaaaacaaaatgccataaccaatcactgcaaaggattgtttaggatagaaaaattgcagcgcggccaataataccaaaagaggaatagagttattgtataaatggcttaaattttcatgaataaaaggactgagcaaaacaccctgtaaacctgacagatctcttggatagactccatattgataaaagtcgaaatcaaagcgtatctgaacccagtacacgatccataaaaaaagaacaaaaaataccggaagaccaataactgcagtcgtaaatttaaagtggttgtcgttcataatttttaaggtaaatttataatgatgacatcaaaaaactatccaattacaatttactgataatttgtcagctaattggaatattcttaaaccctgttctagccctgatagaagcgacatccttttgtgtccacgatagcggacgcaaaagatacagcaaacagcaggaatagcttctaaaaactataaaattaaaaccgaaaactgtaattttacaaaatggaagcacctttagccgagcgtattcgcccacaacacttagaagattatatcagtcagagtcatttggttggcccaaacggatctttaacgcagcaaatttcgaaaggaataattccgtcgttgatcttttggggacctcccgggacaggaaaaactaccttggcacaaatcattgcgcaggaatccaagcgtccgttttatatcctgagcgccatcaattcaggtgtgaaagatattcgtgatgtgatcgaaaaagccaaacaaagcggtggattatttacggctaaaaatcccattctgtttattgatgagatccatcgttttagtaagtcacagcaagattcccttttggccgctgtcgaaaaaggctggattacattggttggtgcgacgaccgagaacccaagttttgaagtcattcctgcattattgtcacgttgccaggtctatgtcctaaatgctttcacaaaagccgatttagaagctttattgcatcgggcgctaaaaacagatacgcatctggcttcaaaaaatatcactttaaaagaaacggaagctttactgcgactttcaggaggtgacgggcgaaaactcctcaatatttttgaacttgtgatcaacgcttctgccggagatgaaattattatcaccaacgatcgtgtttttgaattggtgcaacaaaacacagtactatatgacaaaagtggcgaacagcactatgatatcgtttctgcttttataaaatccattcgtggaagtgatcctaatggagctgtttactggctggccagaatgattgaaggtggtgaagatgtgaaatttattgcccgcagaatgcttattctttcaagtgaagatattggaaacgccaatccgaccgcatttattatggccaataatacctttcaggccgtaactacaattggatatccggaaagcagaattatactgagtcaatgcgctatttatctggcaacttctcctaaaagtaacgcctcgtatatggcgattggcaatgctcagcaattagtaaaacaaaccggggatctacctgttcctattcatttacgaaatgctcccaccaagcttatgaaagaactgggttatggtgatgattataaatactcgcacgattatgccaataattttgctgagcaggaatttctaccagatgccctaaaagaaacggttctttataatccggggcacaattcaagagagaacagcaaccgcgaatttttaaagaaccgttggaaagataaatacggttattaaaaccgtattctatttttagaatttaactgaaactttttcagaaactaactgatcgtttttataatattcaaaaaaccactgattgtcttttgcatttaaagttccttgaactccgtcttttatagcgataaatgaatctggacgagaggttttcaataatttcataatcacctttggcgttttatcaattaactggtaaccattttctgttggttgtgcatacaataaatttggatctttaaggtcaaccaccggagtcgcttctaccactttagcagctacaactgaagtggtcagcggagtagccggaattgaagatttcgtcgtattgacactcttaccactgtacttataacgcaaagcgtttattgaaacaaacgcaagatcaaggcactctctataagccatttcatattctttctctttactttttcctattgcagatgtaaaaatcactttgccgtaacaatctttaaactctaaaaaaagcttggtaattaaaaaaccattctcttttttaacatcagcatacaaaagatcgcaacgatccccaaaaccttccggaagtacctcgttagcataaaaagcctgaaaaccggctttgtttaaattagctttagtcattgttgacgttctatattgattttctgttttaaggaaatcatattttaagggaacaataaccgctttgtaatcattaaccgattgtgaaaatcctataactgatgcaagaaatgcaatcaacaaaaattttattctcataattataaatatttttttagttctaataaatggtttacttgtttaatattttgcggaacttcaattcttctttcattaaagaaaatagcatcaatacctgcatttaaggcaccgttaacatcagcttccagacaatctcctatcatgacactgttttcttttgaagctttggcagcactaagtgcataatcaaagataatactatttggtttcttcacaccagccaactcagaatttgtaatggtttcaaaataacccgaaagcgcagcattatttatttttttatcctgaacatttgcaaaaccattagtaataatatgcaacttgtacttaggctttaaatattccaaaacttcaattgctccttcgaaaagatgattgttgtcggttaaaaattcaatataatcattggcaatctcattgatactttcatctgacatggtgtaatttaaagcatcgaatgaaaactttaatctattgtaacggagttccaaatgtgttattttgtcattctggtataatttccagcactcctgattgattggagcatatttctcgataaaatcttctgttttaatttcgggatatttacttttaaaaattcgatcaaaagccatttcagaatttttgtcaaaatcccaaagtgtatgatctaaatcaaaaaagacatcggtaatagtggtattcataatttataaaattccttgatctacaaaactataatattttgcttcagttataatcaaatgatctaaaactttaacatctaaactatcccctgctaattttatcttttttgtcaactttttatcggcatcactgggtagcaaatttcctgacggatgattgtgacacaaaatcaatcctgtagcaccaatttcaagtgccagtttaaaaacaatacgcacatccacaacggctcccgtaatcccacctttactcacttgggatttagaaattactttattggaattattcagaaaaagcacccaaaattcttcgtgtggcaattctccgatgagaggctgcataatatcaaaaaccgttttactggaagtgattttagccaactgagcggcatcctccgatcttcgtcttcgtcctaactccagagcagcaataattgcaatagccttagcctctcctattcctttgtattttagcaactgtgtaatcgatagtttgcctaaagcattgagactatcaacacttaatagaatctttcgactcagatgtactgccgattcatttcgactacctgatcgaattaacagagcaattaactccgcatcactcaacgcttctttccctttacggatcaacttctcgcggggacgatcttcttcagaccaatctcttatagaaaaataagttcccacaaaatccggggtttcacttgttgtttttacaacttttaaacttgctctcattttacaatactcttagaagttaacacataaaaataagaaaaatccttcacaaataaaaacaatgttaatctcaaattaattattttaactatataaatggcccatctaaatgccttaccttaacggcatgaaaatattaggtgcctttcctctcttccttcttctgctctcctgcaatcaaaaagagagcaaaactgctgtaacagaaagcttgtcgttggatattgcaaaaacttttcctgaaaaattatccaatgcagcattattaattattgatccctcgacagtttacgacccggcttacttttcaataccttatcctaatggggatatcccttcaaacaaaggagtctgcaccgatgttgtaattcgatcttaccgaaaattaaatattgacttacagaaagaagtacatgaagatatggcggcaaatttctctgcttatccgtctttacaaaaatggggactgacttctaccgacactaatatagaccatcgcagagttcctaatttggccgttttctttgaaagaaaaggaaaaaagcttcctgtaactcaaaatgcaaatgattataaaacaggtgaaattgttacctggctgattaataacaaactggaccatattggaattgtcacagctaaaaaatcagaagacggaaaacgaaacttaattgtacacaacattggcaacgggcaagttcttgaagactgtttgtttcagtataaaattactggacattatacctattggaaataaacatctgtaaaagttctaaaaaaaatgccaactgcaaaattgcaattggcacactatctaattttcaaaatgactaattaatcagccctttcacatcatcaaaattcaaccctccgtaatttccggaactcatcagcaataatgccgaattttcaagattcaaattgaacaaatattctttgaactcagcaggatttgtataaataatcaaatcttcgcgattaaaagaatttgcaatttgctcataggtcacttcttctagctgtttaatttttacagcatcaggcgaatagaatactaccgccacatctgcatactcaagagctccttcatattctttaagaaactctgcatttaaactgctataggtatgcaattccaaacaagcaactagggttctatttggatattgctcttttactgcttttgtagtcgcagcaactttacttggggagtgtgcgaaatctttgtacgctacttttccttttccttcagcaattttctccaatcgttttgaagctcctttgaaactggcaattgcttcgtaaaagtcagcttcatcaacgcccatattttgacaaatccatttggctccagccagattgttcagattatgcgccccaaaaacttcaattggcatatcgccttcaggagtttctaataaagttacgccatcacttaccgtataattcggagtggaataggctaattttcgaattgggtttgtagcggcttcggccacacgttttacttccgggtcattttcgttgtacaccaaaatccctccatttgtaattttcccaataaaaatttcaaattgctcaacataattctgataggttggaaacacattgatatgatcccaggctattcctgaaatcaaagcaatattgggctgatacaaatgaaatttagggcgtctgtctattggagaagacaaatactcatcaccttccaaaaccatgaaatcattctcttcggtaagatgcaccattgtatcaaaaccctccaactgtgctcctaccatgtaatctacttcgatattatgataatgcatgacatgcaaaatcatcgaagtgatggttgtttttccatgagaacctccaattaccactcgagttttattcttcgactgctcgtacaaaaattccggataagaataaattttcaaacctaactcctgcgcttttagcaactccggattatctgcttttgcatgcattccgaggattatggcgtcaatatcggcagtgattttctcaggaaaccaacctagttcagccggtaagattcctttcttttccaatcttgattttgaaggttcaaaaatagcatcatcacttcctgttacctgatatcctttattgtgcaatgcaagtgctaaattgtgcatggcgcttccgcctatggcgatgaaatgtgttttcattgaatacgttaaatcgtttgtttgttgaactgtttcttcgagaaacgaaagtacaattccacgcttaaatcggttaattatttttcaaaaataaggaattataaaatgtcacatttgcttttagggataaattagtaatttgtacaacatttatttgagcacgctcccaacctttagtgaaaaataacactctctttattaaaactaacttatgaaaaatatactatttgttttcttactgttatccactgcactatttgcacaaagaacagatgaaaaatgggatgaagttgttacttacgaaaatgatggaaaaattaaatcagccaatgaaatcgtaagcaaaatttacaaaaaagcgatcgcaagaaaagatgaagttcaaatgctaaaatgcttcttctatcaatcaaaatacttacagattattgatgaaaacgcgcaaactaaaatactaaacaatcttaaaacagatatcgatcgtgtttcgattccttcaaaagcaattttgaatttgatttatgcgaagtgtttaaatgattattacaatcaaaataaatattccatccaaagaagaactacaaccacagtaccagatactaatttcttaacctggactacactcaattttactgatcagataaatctttctttaaaacaatctcttgagaacgaaactgttttaaagaatactttattggcaaaatatgaccttatttttgattaccctactttggggaattttaaaaatcaaagcttgttcgattatatagttaatgaaaatatcataacatacaattccaaaattaacaactgggaaattcaaaaaaatgattttgaatcttatgaaaaagcccttttcggaaattccgcggatttcacaaaactgaatctggattttatcaccaatgataatctaagacaatcattatccttgtatcaaaaaagagaaagtacaaatccaacaaaagaaaatgaatgggatcgcatacaattttgcaaaacaaaattatcattaccaaacgatcgctattttaactatttagttcaatttcaaaaagacatcaaagacgaactcctaatccagaaaattcaattagaaaaagctttcattttaaatagtcaggcatcaaaagacattcatcctgattacaacataaaagccattacgactctagatagtatcctagaaatcagtaatagatctaatgcctataaattagcccgccaaaagaaagaaaatgttatttccaaatcattaaatgtacaacttcaaaaatacacctatattgacgaaaatacgagggcttttattcgatacaaaaatctagatcatttaacaatttccttctttaaaatcaatcaaaagcaacttgctgaatttagagtcctatattcaaaaaaagacagtttaactgaggctatcattaaaaaagcacaacctattgtaagcaaaaaatatctgctcacaaataaaaaagacttttttgagtatacgaccgaggttctactaccaaatttaaaaacaggatcttatttagtttactttgaaagtgattcagatgaaaagaataagaaagcctttgcatatgaaaccatcactacaacaaatataatggccttagcttctcagggtgatgctaaagaaacctatcaggttctggatcgaaaaacgggagaaccaatacccaacgcaattcttaagtcgacttaccttaaccttgtaacaaataaaaagggaattgcagtttataaggaaaagaaatatacttataacaatgaagcaattcaaatttccaccgcaaatgatactgtctccgtttataaaaactatattttttacagcagcgaatatgatccttctgacactactgacaacaatgactttaaaggaaaagtcgaattttatttagaccgcgcaatttatcgtcctgggcaaactgtttactacaaagggattgcaatccaaaaaaaacaaaacatcactagtattgtgcctcacacctcttttaacatcagcattaaagatcctgattataacgagattaaagagtttgcagtagtaacaaatgagtttggctctttttctggcgaatttatcttgcctaaaaccggattaacaggcaattttacgatgaaagctgatgacgtacatgattatgaaaaagacattatctatgacaaagaaaatgaggaccatcctttctgggaccatgtcaactttgaaaattctcaaactgattttagagtagaagaatacaaacgcccaaaatttgaagtcacttttgaacccaaaaaagaggcctttcaaatcaatcagtcgattcaagtaaaaggtaatgcaaaagcatttgccgggagtgtgatttctgacgcgaaggttacgtattcggtaactcgttatgtcgattattacagaaatcattacagtaacgaactaactgaaactatttcaaccggggaaacaaaaaccgatgcctcgggtaaatttattattgattttgtcgcagtaccttctaaaaacagcaacaaagagcaattgcctgtttttaattatcgcattaaagcctcggttaccgatataaatggtgaaacacatgaaactgaaactaccgtaaaagtcggctatcacgatttggttctacagacctttatcgcccctgaaattagaactaaagataaaaatgaagttaaactggaaagtactaatttaaatggagaattcttagcagctaaaggtgaagttaaaatctactttattagtccgttttcaagcaaattcaaacaaaacgtatggagtaagcctgaaattgaaaccataagtaatgaagaatttgaaaaattatttccatacgaacaaaacaaaagtgacataacaaatgaaaaaactgaagttctggtttattcaaaaaaagttgatactgaaaaggacaaaaaaatagttctggattttattacaaattacaagtccggaaaatacaaaattgtattctctgcaaaagaccgttataacaatactattgaaagcatcaccccttttgacattaagcaaagtaaagacaggttcaatccaagtaaactttttactttcgaacaggttaatcgcgacgctaaaaaagacggttttgcattaatcaaattaacttctgttataccggaactttacatcattgcaactgggagttataacagtaaaatcttttttgaagaaacctatcatctacaaaacaacgagactataattaaaattcctttaaaaaatgaatttgaaaaaactatacagattggatttcaaagtgtttttgaaaatgaaacttttaaccttcaaacagatgtaacattaaaagaactaatctcaaaattggagtttaatgttgaaacctttagaaataaaatacagcctggaagcagtgaaaactggtcttttaagctaaaatccattaacgcaaaaaaagaagctgaaattttagcttcaatgtatgacagttccctggatcaatttacccaaaaagattggccaaatctgggcatttatgattacaactataatcaaaacaataccaaaaccgctctaggtttcgaaaagacttcaacatcgattattaatctaaatccacctctaaatcgtgtagaactctataacgaaactaccaaactaatatggtttggatttgattttgcgaaccaaaacaacaatttacagctgcaaagagagtatcagaggcaactttctaaaaagaccaaaaagcctctgaatgcaaaaatgatttctggcgtgattaccgagatttcaggacttcctttgcccggagtttctattatgatcaatggaacaaaaagaatagcacagagtgattttgacggatattacgaaattgaagccaccgaaaatgaagaaattatattcagttatcttggtttcaaaaacaaaacggtgtctgttgaaaataaaaagaatatagatattattttagttgaagattcaagtgccttaaacgaagttgttgtaactgcttatggaatacaaaaaaaacaaaaatcactttcttatgccgttagaaaagtaagcgctgagtcgatatcagaagatgctcctgtaaatggcgccccggctacaatgctttcaggaataataagtggtctggagattaccaaaactgattcagataaaatagtgattcgtggtgcagcttctaataccgcaacacaaccactaattatagttgatggagaaatttctaatgaagaaactttaaaaaatctgagcccctcagaaataatttcaattgacacattaaaagccgacaaagccttagtactttacggaaacaaaggtgcaaacggagccataatcattacaaccaaaaaagccttagaagccttaacacaagtaaaagccagaaaaaatttatctgaaactgcttttttcctacctaatttaagaacggatgctaacggaaaagtgagttttaactttagctctcctgaagctttaacgacttggaaacttcgtttattggcacataacaaagatgctgtttccggttatctggagaaaagtgttgtgactcaaaaagagttaatgcttttaccaaatttcccacgcttctttagagaaaaagacacgattgtaatccatgccaagatctcgaatattaccaacgaaacgaaaaccggaattgctgttttacagttttttgatgctacaaccctacagccgatcgatgctaaaatgctcaatgcacaaaacatcagaaactttactgttggtgctttcggaaacacaaccgtaacctggaccgtttcaataccggaaggtttgcagggtttacaatataaaatcctggctaaatcaggcaatttttccgacggagaagaaaacattctgccggttttgacgaacaatatgcttgttacagaaagtattcctatctgggttcgtgaaaactcaaccaaagagtatacgtttaacaacctaaaaaacaacaattcaacaactttaaagaatcaccaatttacattcgaatatacttcgaatccatcctggatagctattcagtctttgccttatttaatggagtacgagcatgaatgtgcggaacaaacttttgcccgtttttatgccaatgctttggcttcggagattatttcaaataatccgaagattgcgactgtttttgaaaattggaaaaaaaatggaaagctaacttctaaactagaagaaaatgaagagttaaaatcgattattcttgctgaaactccgtggctaaatgatgcgcaaagcgaagacgaaaagaaaaaaaatctggcacttttgtttgatctggagaaaatgaaaacttcacaggaaactactttcgaaaaattaaaacaaaagcaaaaagcatcaggaggatttttatggtttgacggagggaacgaaaatgaatacattacccgacatattctggctggattgggtcatttatcaaagttaactaaaagtagtgataacaataaaatagaccaaattgcaaaaactggtattccgtttttagacaataaatttttagaatactataaaaacagaaccaaaggtttaaaagctgtagagaaactaatttggatcaatccgtattctgatctgcattatttatatacaagaagtttttatttagagaaatatcctctttcagacactttaaaaaaagccaccaaactttatttagaaacagctaaaaaagattggttaaactattctctctacgaaaaaggattagctgcattaactttgaatcgttttggcgaaaaagaaattgctaaaaaaatcatagaaagtttaaaagaaacatcatcaaacaacgaagatttaggaatgtactggatcgtcaataaatcgggctggtattggtatcaggcgccaatagaaacacaggctttattaattgaggctttcgcggaagtgaataacgataccaaatctgttgatgcaatgaaagtatggttattaaaaaacaaacaaaccaaaaattggccaacaactaaatctactaccgaagctatttatgctttattaatgcaaggaaatgactggttaagtgtgaaagacaataccgttattaaaattggagatgaaaaaattctaactaaaaaactgactgaaaatgaaaaagaagctgaaaccggttatattaaactaagctggaaggccgatgaagttaaaaaagaaatggctccaatcactattcaaaacaaatctaaagttcctggttttggaggtgtttattggcagtattttgaagatttggataaaattaaaaccaattcaggatcggtcctctcagtctcgaaagaactatatctaaagaaaagcacgttaaaaggagaacaattagaaaagatcagttctaaaaactctttaaaaaccggagatttagttacagtacgattgatcattactgcaaaagaagacaccgaatatattcatttaaaagacatgcgagcttcttgttttgagccggtaaatgtgctttctcagtatcagtataaagattatttggggtactatatgagtaccaaagatgcagcaactcatttcttctttgatacaatcaataaaggaacttatgtaatagaatacgatattcgtgtaaacaacagcggagaattctctaacggaattacaacaattgaaagtatgtatgcaccggaatttacaagtcatactgacggaattagagtaaaagtcaattaacaactggtacacattccaaaaaataaaatcccaaattccaaaagcatgctgcaaagaattccaccatgaattcacgaattaattaattaattaatattcgtgaatccgtggcgaaaaaaacaaaaacacccgacagattttaaaaacctgtcgggtgtttgttcaataaaaaaaatcgaattatttaataatcgtcatttcgtcaataatgtttttagcacctgcgtatttgtcgataatccaaagtacgtaacgaatatctacgttgattgttctttgtaatttagaatcgaaaataacatctcctgccatcgcttcgatgtttccgtcaaaagcaactccaattaattctccttttccgttcaataccggagaacctgaatttccaccagtaatatcgttatctgtcaagaagtttaccggcatataacccgctttatctgcatactgcccaaaatcttttgctttgttcaactctaacaaacgttttggtaaatcaaattcctgatctcctgctttatactttttaaccatactttccatggttgtataattattgattttagcatcgttacgcggatcagcaggtaaagctcttacttttccgtaagttagtctcaaggtagagttagcgtcaggatattgaatagcattcagtttagattctcttaaaccttctaccaatttacggtaagcacttgcgaaaccgtcatcagctttcaactgatcgtctgttttagcacggtattttgtcattaaatcgttagagataatatacaaaggatcgtgtacaattgctaatggtttaggattagccataaatgccaatactttgtctttagaagtaaaataactgatttcagttgcttttgccacatcggcagtaaagtcaccattgttccctgatttcattttagcaatttgcgtcgctaaaccatattcagcagctttagaagcgtataaattcaattgtgctgttaatacatctttttcaagaggcgcataaaattcaccatagatgttttcgatcattgcgttgatcttaggcagcatttcagctttcttagcatcattttcgttgtaataagcgatcaatgcgtttcctaggttagcagttccggttgcgtaagctgatgtacgtaaaagctgtgtcaggtaattatcatgagttgattttacatttgtagatctgtaataatcattaatagttggaattacattctcatacttttctttattagccggtttagtagcccactcgtaaaatttatcttcttgtcccgctttaacctctgctgttcccgcttttgttaaagcatcaatcatcccctgacggtttttccagtagtttgctgtagaagcatatttagacgcgtattgcaaacgaactgttgcatctttgtccatatactttttcatttgatccattccggttttagcaccttcaacccaagcagggtaagcaaacttaacgttttgctcaattcctccagccggcatccaacggtttgttcttcccggataccctaagatcatagcgaaatcattctctttaactcctttaatacttactggtaagtagtgttttggtttcaaaggcacattatctttagaatatgctgccggatttccgtctttatctgcgtacactctgaacatagagaaatctcctgtttgacgaggccactcccagttgtccgtatctccaccaaatttaccaacactttcaggaggtgttcctactaaacgtacgtctgtataatcctggtaaacgaaatagtaatactcatttccctgaaagaaaggacgaacagaaacggtatattttccaccttcattgttttccttttcaatcaaagcaatttcttgctgaatcgctttacttctttcagtctctgtcattttatcatttacttttgacaaaattcttttagaaacatcatccatacgcacgaagaaacgtacatacaatgatttcggtttcatttcggcacttctttgttttgcccaaaaaccgtcttttaagtagttttgctctgccgaagatagttctgcaattgcgtcataaccacaatggtgattggttaaaaccaatccttctttagaaacaatttctgctgtacaacctccattaaattgtacaatagcatcttttaaactatgatggttgatactgtaaatttcttcggctgtcaattgcaagcccattttttccatatctctatggttcaatctttcgataaacatcaaaaaccacattccctcatcagctcttacaggaaaagccatcagacacatggtcaagaataaaactatttttttcatgttattttgtttaagtgatgcgaatataattcattttcataattatactaccgcaattcctgccgaaattagacatctcagtgattttttagcatttcattacgaatttaacaccaataatgtatttaatttggcctacgaaaatctgttattttcatgttatatgaatagtacacaaaacaaaaaaggtgctctgtttccagaacaccttttttacaaattgtattttttattcgttaagcattttccaaagcttatctttcaaatccgttaaaccctgctgagccactgatgagataaacatatatggaacgtctttgaaagcgacgtctaattcggtcttcaattcagctttcaattcgtcatccaacatatcacatttagagattactaaaagacgttctttgtctaacatttcaggattgtacttggttaattcattgaccaaaatatcatactctgctttaatatctggtgtatcaaccggaactagaaacaataatgttgagttacgttcgatatgacgcaaaaagtaatgacctaaacctttcccttctgcagctccttcaataattccgggaatatctgcaattacaaaagattgataatctctgtacgccacaattcctaagtttggctttagggttgtaaaaggataatcggcaatttttggttttgcagaagttaaaacagacaatagggttgattttccggcatttggaaaacctactaaaccaacgtcggctaatactttaagctctaaaattacatccatttctactcccggtaaacccggctgagcataacggggtgtttgattggttgaacttctgaagtgccagtttcccagacctccttttcctccttttgagaggattcttttttcaccgtcttcggtaatttcgaataaagtttctcctgtttctttgtcttttactacagttcctaaaggtacttcgataaatttatcttctccgtcagcacctgtactacggtctcctcctccatctccaccgtggcccgctttaatatgtcgtgcaaattttagatgaaataatgtccaaagtcctttattccccaccaaatacacgtgtcctccacgaccaccatcacctccgtctgggcctcctttttcaataaatttctctctatgtaaatgcgtagatcctttacctcctttaccggaagaaacataaatcttaacataatctacaaaatttccttctgtcatttttctgaatttcagattttagattttaaattttagatttctctagcttctatttctaaattctattttatttatctttcagctgcagtcacctttttcagtaccaaactatgactgaaaactgtgactgaaaactaaaacttcattctttaagcgcttttaccaacactttatcaatctttacgccatccatatcgattacttccagcacaaacttttgccagattaatttttcgccttcttttggaatatgcgaaagctcggtcataatcattccgcttaccgtgtttacttcataatcgtttgtcaattcgtctaactcaaaataagttaaaaaatcgtgtaacgaataatgtccgtcaacgagccacgaaccgtcttctctttcaattaattggaattcatctttataaaaatcagatgcatctcctactaaagcttccagaatatcatttagggtaataattccctgaaaaacaccatactcatcagaaactaaagcataatgaatccctgtttttttaaaattctccagcgctttgtatgccgttgtttgctccattaggtaaggcgcatcaatcatgattcccgccaaatcaaaatgttcactttcaatgtttgcaaagatattctttagggttacaacccccacaatatcatcataattgtctctgtacacgggataaacagtatgcaaatcctgcaaaaccaattccttaatcttcgttttatcggcattgaaaggcagcatatcaactgacttacggtgtgtcatcaacgaatttacttttcgatccccaatgtgaaaaacacgttctacgatatcttgctcgatctcctgaacttctccgccctcagtaccttctttgataattgctttaatttcttcttcggttaccttaccatcggcagttggtttaatctgaaatacattcagtaaaaaatctgtcgaagaagtaagcagccagataaagggcgctgtaattatcgaaatggttttcataggcagcgctaccattttggcaattgcctccggataatttaaaccaattcgctttggcaataattcccctaaaaccaaagagaaaaatgtcaaaaccacgaccacaatacctactgcaacagaatgagcatagggttttaaaaatgcaaatccgctaacaaaaacctcaacgtccattgttattttatcaccgctgtaaataccagtcaaaataccaattaaagtaattccgatttgtacggttgacaaaaatttatttggagaattggccagatcaagtgctattttagcactattgtttcctttttttgcggcagtttcaagtctgtttttccgagccgaaatcaatgcaatttctgacatggaaaaaacaccattcaatagtattagaaaaaatattattagtatttccaatttttggtttattcgttataaaattgtcttcatcaagataattctgtcatcttaaaacttcgtctccctatcattcaaaagaatcctgtcttaaaaaactaatttttcttcccagaaaacagcaccacaaaaatgcctgttttatgacaagaaaaatagttcttaaaagtcccgatcgcagtcgggatgaaacgacagccgaaaaaagcttctacaaattatctataactgacgttaatcgctctgtaatttcttcgatggttccgataccatttacggcatgaaacttattttgttctttataatatccaattagtggagctgttttttcattgtactcctggtatcttactctaattttctcttcgtcctgatcgtcagctcttccgcttgtttttcctctttctaacaaacgagccactagaatttcatcatctgcttctaatgcaacagtcgccgttacacttgatccaatcgttggtaaaaattgatctaaagcttccgcctgatctaaagttctaggataaccgtcgaacaaaaaccctgctgtatcaggatgtttttttacctcatcaattaacattgcggtagttacttcacacggaactaacgctccgttatccataaaaactcttgcttgttttcctaaatctgtatcattttttaagttaaaacgaaaaatatctcctgttgaaagatgtgttaatttgtacttttcttttaaaaattctgcctgagttcctttacctgcccctggctttccaaataaaacaatgttaatcataatatgagtaagtgttgtgacttctatttttacaagaagttttaaatgaatatatagttgtgtgcgtgtttcaatttattctgccaatttataaacttcgggaaagtttcttcccaaaccatcatagtccagtccgtaacctacaataaatttatttggaattctgattccgatataatctatcttgatgtcttttttataagcttccggtttaaaaaacaaagtagcaattttaaaatgctttacattttgcgctttaaacagttgtttcaattcttcaattgtatttcctgtatcaataatatcttcaataagaataaccgttcttcctgataaatcctgattgatccctattaattcttttaccgtattggtactttcaattcctttataagaagccattttgataaatgaaacctcgcaaaggcctttgtatttcttcaaaaaatcggcaactaccataaaagccccatttaaaacaccaataaaaattggggtatcgtctccaaaatcatcttctacctgtgctactattttagttaaagcgaaatcaatttctttggccgaaataaacggaacaaattgtttatcgtgaagttgtatcattatttttacatttaaaataatgggcaaagatacagaattagaaataaactgcgggtatcaaaatataggacatacctatttgtttattttctccaaatcataatgaagaggaaaacaacaacaaaaagagatttgtattcacataaacagcataagcatctgcgaaaaaaaacgtaactttataactgattgtctgcatgttacaaaacactagaaataattaactttcagtaaatgcaataaatagttatacttaaatgttatctatccggatacaaacacattcgtttgatgtttgtcttaaaacctataaataatatgaaaaaaatactattaactattatactaaccggtgctgttttacagggatatgcgcagaaggaaatgaatggcaaatacaaacccattgattcgaaaaatgttgaattaaaagacgtaccgccaccaacagaaactccgttaaatcctgatcttccgctgccaaaagagcctaccgttttaaaaatcaatccggaagatttgtataaaaacaacagtctgtacaaacccgaagccaatgtggaagggattttttacagaagaaatgaatatttgggaggttttgtcaccaatacagctgtgtctactattcgttatcgcgatgctgcttttgtcgatggcgataaaatacgagtatacctgaatgataaagtaattgaacccgaagtaagtttaaacggagattatcagggttttaaaattaccttggtaaaaggaatgaacaaaattgactttgaagctttaaacgaaggttctgcttcacctaataccgctgaatttcaagtttatgacgacaaaggaaaagtgattgaagcaagtcaatggaatgtgggaaaaggttacaaagcaactattatcctgtataaagaataaagttttcttcacaaataaatattctttctttaggttttacgaccataaagtaaaagtcttttaaaagaataaatagcgggaagtttgggaaaactttccgctattctttttttataggtttcgataaaaagtgccttctcctctccttccagtctttctgtatacggaatcaaagccgatcccgagatgaaattaaaaagtgtttcatgatctttagctataattggatataccttttgctgcatctgaaggtcttccaatccgccatcaaacagaatttgtgcgtactcatcgatacttaaaaccggggattctcttttaaatccttttaagaaagaaacgaaaggctcttcctgtaccagctctaaaaggattttattgagcttgttttcgggctgaaccggcatttgtacagcaaattgtcctttcggatttaactgttgcagcaatctggtaaataatatctcatgattgtccgaccattgtaaagctgcattactaaaaatcagatcccatttttcgtccgattctattgttttttctgtggtcgcttttctgaaatgcaaacgatccgtttctaaagacttcgactgttccagcatttccggcgaagaatcgactcccaaaaagtacgcttcttcaaattgattagacagaatcgccgtttgttctcccgtgccgcaacccaaatcaatggctttcattccttttacttgctgaataaaaccggtcaaatcataaaatggctgataacgaatatttttaaacttattataaatttcgggattccagggcattgcttacttattttataatccgttctgattgaaaaaaaaccacaatcaggacagatttaggttactaaagactaagatacaaaattattcaaggtagatataacaataaaaacagacattacaatgcgtatttatacggcttttagtaaaagtgtgtcgttctgtagtagattgccttttattaaaaaaagaaacaaaccgaacaggttttaaaaaactgtacaatttgttagaaaaatgctgataataaatactcctttctaataagtgactaattttaaatgatactaatacgctctcctttacaaaagagtacgtttttaattttttatgtttttctttaatcttaaagcatcatcttcaaattatctaattatcacttttgacttcattactcaaaacacgtaaaaacataaattttatactatcgaatatccaaacattgcttgcggtttccacagcagaaacacaatgcaaaatacctgactaatacagcccgcagttgaaacttacaatcatactttactcttttttctataaaaaatgcccccaaatagtgtctaactatttgggggcagttcattaaaatttgtcgggtttacctacattttaatatctttctacagtacctccataaattttagataaggagtcatcaattttttatcaaaaacaggtggcgttaaattcgaatccgataaaaaatatcttgtattacttctgtcataataataggtgttttcataagcctcaaccaaagattttccttcatgtacatcttcggtaaacaaactcagtaaaggatagattggtaaactattatcatatttccattggctcagccacttatgatactccatcccttctaaatctgtagcataatattcgttcattttagcacaaaaatcggtcagggatacatcattttcggccaaaggagacagatggaaatttaaaccaacagcttccttctttttactgatatgtgtgatggctttacacatataatctactgttgtaagctcatcttttaatcccattaccagaggaaaagatttgagtttaacgcagcttctgattaatgctccccaccattgattcattactgttgctcccgaggtgctgtgacatacggcaaaaccgagtctgaaattaataattggcagcccctttgcctttgctttttcggcaatactttccataacccatttacttttaatgtatcccaaatcgcgagaaacagcggccatattctgatcgattgcatcatcttcgtacatccatgttttttgggtaaaagaccttccccaactaaaaacgcccattgaagataaaagtaccagatattttaccttttcttttacggcaagatcaattatattatgcaaaccgtctatgtttgattttttaattacagcataaggctgtacataacttacagaacttccggaatgataaataacttcaatttgtcgcgcaataaaagaataatcacccacagtcattccaaactgaggcaatgacaaatcccccactatagcaacaacccgatcgttatagaagggaagccatggcaatttaaatttatcaaatgtgtttttaattctttccaatccgctttcaggagacgaagcccgtaccaggcaatatatttcagcgacggttttattcaaaagttcttctaacaaatgtgatccaataaagccggtaactcccgttaaaaaaatacgtttcggattagtcagcagcgcagcatccggtatttcctttatatcaaaatcaatatgcaattccgagtcgctaattaattcatcaatcatcaacccggctctttctttttgagaaatttcgatttcctgaaatcttttctccacttcttgtacaaaggtagaaacagtcttaaaaatataaagctccggtagactaatgcaatttttaacgggttcaggaagcaatacatgaagctgtgccagaagtaatgaatgtccgcccaactcaaagaagtcgtcatcatcatcaatctcttctatggtaagtaaatctttccagatgtcttttacaatttcgggaagattggctgtctctcgtttaggaactgctttgttttgagattgattttccggaatttccaataataatctatcaatttttccggcatgtgtcagcggcattttatcgatcacaataatcttatcaggcaacatatataccggcataagctgttgtagttttgctcttatatgttgcagggattgtatttcgtcatcgtgtgcggtcatcaattgtataaaagcaatcagagccggaagaccattttccttccgatgaacttttatggccgccttagagatctgtgggagctttgtcatatggtgttcaatttcacccagttcaattcggtagcctctaattttaacctgatcgtcttttcgtccgtaaaactccaaatttccatctggtcttttcagaactaaatcccccgttttgtagattattcgtttttgccctaaatcatttctaagccattcaggggctttaataaatacattttttgtgtcgtccgggcggttcaggtaacctaaggccagttgcggcccaccaatatatagttctccaaccgagccgtctgctatcggttttaaatctctgtcgagaataaataaatgagccagtggcatcgcagctccaataattcggggattggtctcttccttaaattcgtaattcgtaacagcaacagtggcttccgtaggcccataactattaataagccgaatttttttgtaccaggatttaacagtagcctcactaccggcctcacctcctatagcgatcgtttttaggtttccgataggcttgtttacaggcaatgaagccagtaccataggtggcagcaatggaatagtatcgatattttgactgactataaaatctaaaagaggttcgccaacaattttgttattgggatacaaatagaccgttgcacctttaattaatggggtccagatgtcaataattgcggcatcaaaacttggagaagcaaattgcagtgttgtgcttgctgcagacaatcgcaagagatccgattgatattcaacaaaattataaaaagactcatgaccaatactaactcccttaggtaatccggtactacccgaagtatatataatataagcggggctttcgggtgcaattgagatttcaaaatcagctttggaactctttttgtaatcttcattttgaaacaaaaagtccagggcaatactttcattggcattgttgtaaactttattcaaatgcagttccaccgttaacatcatgtctattttcgaatcttcgatcatcatttgtatacgagactccggtaactctccgtcaataggaaggtaagctgcacccgtttttaaaattgctaaaaaagcaataatccgatcaaccgattgcggaatacaaacacccacaaccccattttctgcaatcccttgttctcttaaataatgagccaattgattcgtttgttcattaagttctttataggtgattttttcaatgtcgtcaataatagctaatttttcgggatactttttaaagatttcttccatcttcctgacaatattaatggaagattcttctaaattattgttcaaaaaatgaccttgattctccttcgcagttgcattcatttcttcgttcatggtgatttcaatttagggttaaatttaggggtaaatacgaattgactataaaaatctaaataacaaacacttacgtatttttaacatttaaaagcggacaataaatttaacttaaaaaagtcttaccttttacaatgaaattattaaatcgatgttaacaaaaaacaaattaaacaattaataatcaaaacattaaaatatctgtttttgtaaaaaaagctattaaatcagtgctaatctgaatctgatgatctactttcgggaaatataaacaggcgggatttaaaaccctatcaggtttatggaatagtagcaattttattgacctagatcaaacttttgtgtctgaaacaagtctagctttgctgctctttaattcaaaaaacgcaacaaaagatgatcagcacattatcctatcctttagaaaaatttggtttaaccagtgtcgagcgtgtcgaaaatgctttacgacaactgcgaaacggaaaaggaattctattaactgatgacgaaaatcgcgaaaacgaaggcgatttaattttttcggcacaacacatcaacgtacaagacatggccatgatgatacgagagtgcagcggaattgtttgcctttgtctgaccaatgaaaaagccgatcagttggaattaccctatatggtgaaagaaaacaccagtagttttcagacgccttttaccattacaatcgaagcaaaagtgggtgtaactactggagtttcagcagcagatcgaattacaaccattaaaactgcaattgcactaaatgccaaacccacagatcttgcaaaacccgggcatatctttcccctacgtgccaaaaacaacggcgtccttgaacgaaacggacatacggaaggcagtgtagatctaatgaaattagcaggcctcgagccggaagccgtcctgtgcgaattaatgaacgaagacggaagcatggctaaactggacaaaatcattagctttgcagtacaacatgatttggtagtactttcaatagaagatattatctactatcgaaaatatgtaaaagactatgtttaattactgattgttaatggtttgttgttgatagttgatagttaattgtttatactcattatctaataatccaacaatctaacaatctaacaatctaacaatctaacaatctaacaatctaacaatccaacaatccaacaatctaacaatctaacaatctaaaaatctaattatctaattaaaaaaatgccctacaaacaacttggtgcttatataaaaagtcgtattgcagtttctgatcaagacctcaatactattttgtcgcattttaaacctttggatcgggacaaaaacgacctgttgctttcggctgggcaaacgagtcaaaatagttattttgtagataaaggctgtttgagaatttattacatcaacgaagaaggaaaagatgtcacccgatacattgcattcgagaatcaattcgccacggctttggtaagttttattaccaaaatgccttcgacagaatacatacaggttatcgagaaatcggagttattgtatatcagtcatgaagatttcaatcatttaatggagattgttcctcaatggagggagttttattgttcgtatctcgaaaaagcctatgtcaataacaccaacagactcatgtcgtttaccactatgggggctttagaaagatacacccaattgctcaaaatcaatccaacaattgtaaaacgattgcccaataaaattgtagcttcctacatcaatatttcgcaggaaacactaagcagactgaaatctaaggttttaatttagctccctgtcaatctgtgaagtgcgaaatctttttagtgagatgtgagatattaatagtcagagcctcaggataaagagtgaagagtgaagagtaaagagtaaagagtaaagagtaaagagtgaagagtgaagaatctgccataaacaattaacaattaacaatcaacaattaaccatcaacaataaaccattaacaataaaccattaaccattaacaatgcacatcgataccattcttgacaacatctttcagcttcccgaggggtccaaaaatgcactaaagctttgtattagtgaaataaaatatcctaaaggacacatactgttaaatgccggaaaggttgagtctgcgctctattttataaaaaaaggaattgtgcgggcgtatgtggatgaaaatgatagtgaagttacgttttggttcggaaaagaaggacaaaccgttgtttcgatgaaaagttatgttgaggagcaaaaaggttatgaaacgattgaacttctggaggactgcgaactctacgaattaaaaaaggcgcatcttcagcaattgtttgataccgatgttcatattgccaattggggcagaaaatttgccgaacaggaacttgttaaaaccgaagaacgcctcatttcaaggcagtttagaaatgccactgatcgttacctggaacttatgaaataccatcccgaactacttcaaagaattcaattgggacatattgcctcctatctgggtatcacgcaggttagtctgagcagaatcagagctgatctgaaataaattcattttttatcatttgttaaatttttattgcgggagttaaaggaactttgcgtcctaaaattttaacaattatgaactggattattctaattattgcgggactgtttgaagtctcttttgcaacttgtctcggaaaagccaaagaagccaccggtaccgatgtttatttatggtataccagcttttttgtatcactaaccataagcatgctgttactgattaaagccactgaaaccttgcctatcggaacggcctatgcggtatggaccggaattggagccgttggaacggtattgatggggattcttatttttaaagagcctgtagacttctggcgattattttttctctttactctggtaagttctattattggactaaaagcggtatcacattaatcagacgataacatttaccatagttacttcaaattcaaatgtcaattcagggaacggaaattttattcagtacaagctgattttttttgccctttttcgttccctgaaacgacaaaagagacctaatctgtctttttacttataagatttatccttttattttttttctttatttttttaatgaaacaatgttgcatttacaaataagaattctatatttgtacttcattgctttattagctatggattcattagaatgaaaaagaaatttaaatttataaatcttttgatgccgttggtggtagtatttgctatactatttccggcgatacattcatatgaacatatacacagtcacagttccactgctaaaaaagccgtactttatcctaccgataaaagtgaatttaaaatgcaggatcactcaaacgaagagtgtgctatttgtcatttcaaattcagtccggtcagcacttttgactttgtaacttttcagttttataaaaatagtacgccaattccttatgtacatttttattcaaaatcgtttgctccttttttcaaaggctctttatttgcccttcgtgcgcctcctattgcctaaaacgacaaaagtaaatcatttcaattctgagatgatgtgcggttacgcgttttagacaccctcaataccgaaaaagtatttcactttttcactacagcgctattttatgtctttttctatatttagaaaagtactttgatcgatactgattgatacaattattccttttaggaataccactttcgtacaacactattgtttcaaaagaacttcgctgtcggttgattgtctgaaactgtacaattcgatacctgtaattgggtattgagatggcttcactgcacccccttttacttttgtttcccaatttccttcccgatgaaaacaatgctttttgcggcctaatcctgtgccctaaaactgccattttcctagtattatcaggtttggaatacgccttttgtaacccacaattttcacatatgaataccacaaaactcaaaccaaaccgaatgagaacttcaaaaatgcttttggcttttttggcggctggctttactttcacaagctgtgacagtgataaaaccgaaattgataccgaatatcctgtaattgatgtttctgccgcgaatgcgttcccgatacaatgcagtacgatcactcgcggacaaaaaattactttcagagcaaagttttcagacaacgcacaactgggatcttatagtctggacattcaccacaatttcgaccatcacaatcacagtaccgaagtagcatcctgcaacgaggatcctatcaaaaaaccggtaaacccgatgctttacatcaattcggttacgattccttccgggcaaaagagttatgaagcggtccaggaaatcgaaattccacaaaacattgatgccggagattatcatttcctgattcgtttaacggataaggaaggctggcagacgatcaaaggtttgagtattaaaatattataaattgattttgatgaacaacactaagtcaagtcaattgcggacttattgcgtgctgctcttttgttttgttttggttacaaaagtagcagcccaatccgttcgtgtttccggcaccgtattttctaaggatcaaaaacctttggaaggtgctttggttacgctgtatccggctcatattagtactataaccaataaaaaaggagagtatttcctaaatcaggttcctaaaaacacaaagcgattaacggtaacctattccgggtatgcttcttatgaaacggcaattgctataagtcaaaacacaattgtgcagcctgctattttcttaaaaccggaaatacaggagttatcagaagttgtcattagtgaaggttatgaagtacgtcgcaaaaaacaggaatcccttaatcttgaaatcgtaaacagcagctttatccaacgtaatcttggcggaagcttaatgcagtctttgcaaagacttccaggtgttaagaccatttctatcggttccggtggctcaaaaccactcattcgcggactgagtttcaatcaggttattgtagttgaaaacggtatcaaacacgaaggtcagcaatggggagcagatcacggtttagaaatcgatcaatatgctgtaaaccgcgtggcaatcatcaaaggtccatcatcgtttatgtacggttctgatgccattggcggcgccataaacatacagcctgtaccttttcctattcaacatgttttgggcggaacagttgattttacaggcaaaagcaataacgaacaattcgggggatctgtcaatctttacggtcgaaatgaaaaatggttctttgattccagaataactgctatggattacggagactaccgcgttcccactgatacggtacaggtgtacaattatgccgttcctttatacaaaaaccacttgcgcaacacggcaggacgtgaactcgatgtacacgccagtaccggttatgtgacggatcaactcaaatcagttttgtatttcagtaacatttataccaaaagcggcttttttgccaatgcacacggactcgaaccacgaaatgtagacacccaactgcacgatcgttccagcagagatattttaatgccatttcaggaagttacacataccaaaatcagtaataccacttccttttcgttaggttcccaccgtttcgaaacgcagttgggtttccagaaaaactttcgtcgggaatggagtcattatgtcaatcacggttatatgccacccctgtatccttctgataggcatgctccggaagatctggaaagacaatacgataaagaagtattctccgctgcttttaaagatgagttttccatccgaaatcatcaatttaccgcaggaattaatgccgaacagcaacaaaacagcattaacggctggagttttctgattcctgcctttaaacaattcaatgtcggaggatttgtttatgataaaattcagcttaacgaattatggctgcttcatgccgctgtacgactcgattatggtaaaatcaaaatgaaacaatacaccgactggtttccaagcgaagtcactgaaaacgatcaaacaacttctgaatatttgaaacgttctgaagacctgacccgtacttttcagagtttcaattggtctgcaggcgttaattattcaccgggacaatggtccttaaaagccaatcttggaacaagtttcagaatgcccattgctaaagaactggcttcaaatggggtaaattatcattatttcagatttgaaaaaggcaatcccaatttagcagccgaacgttcgtatcaattggatcttggtatggaatggaagaatactaagtggtcttttcaactgagtccgttctttaattatttccccaattacatttacctcaatccaacttcgcaacatgatatttattacggagccggcaatcaggtatttgaatacgagcagagtaaagttatgcgttatggcggtgaattacagctccgttatcagtttctggaaaatttaagcggtgaaattttagcagaatatctgtatagcgagcaaatgtcgggagataaaaaaggatacacactacccttctctccgcccccatccgttttgtttggcatcacttacaatccaaaaataaaaagtttaaaagacacctatttctctcttgattatcgctttactgccgagcagcatcagattgtcccacctgaaaagaaaacagcaagcagtaacgtctttaacctcgccatgggaactaaactaaaagccggacaacaggattttatcattagtcttcaggttcagaatctgttcaacacaaaatacctcaatcacaccagtttctacaggttaatagaacttcctgaagctggaagaaacattattatatcgctgaaaattccatttttaatacaccaataaataccctatgaatttaattaatcaacccagtaccctaatgaaaacgctaaaactaatactgctctttctggctgttaatctgtcttttacagcctgtagtaacgatgacgacaaagaagttataaaacccaaagctgaaaatattgaaattggtaccgccaataataaaaaagccctgattggccgcgattttcactttaatgccgacgtacttgccggagataaaattgccgatgtacagttgaaaatccttcccataaaaggtgaaacttatagcaaagactggaaatttgaactgtcctgggcagaatacaaaggcgcgaaaaatactaatgtacacaaacatttcaatattccggctgatgctccggaaggcaaattcgatttcctttttattgttacagacgaaaacggatctaaactcgaaattaaagaggtcgttacaattacagatcctgccaacttgcctgtcgatcccgtaattggccgcgataatctctcccgaaacgataatctgatttactatatgaatacctgggttgaaccggagcttattttcaaaaagaatgatcttctgactgcacatgcacaggtaagtcaaattatgggcgatggaattttatattctgttttgattaaaaaaagtgccaattacaatccagaaagtattgacaagctcgatttgaagaaagttattgtcatttcaaaagtcgaacataaaggtctggggcctgcttcaaaaattactacccttcaaaaaataaatggtgttttgggcggtcaaagcatcactattggtgcagctacagatttcgaaggaactccaattacagctgacaaagcctggcaatccggaacctacaattgggtaatactctataaaaacactacacacaatataagcgtctataaatcgatgcctattaccattaatttttaaaaatcaactttaattacctttaccatgaaaaacaatttttacaaactccttttcctattcgccttatctgcaactgtattttcctgcagcaacgacgatgacaatagtcctgaaactcccaaagaagctttaaccgaatataaattcttaagaattttactttctgatgaaaaaacaactgagatcaccttagttaatccggttgaagccacgataagctcttttaatgctaagtttgcaaaatctactgtttatactacagaatccaaacgatatgcgggaatcattcacagagccagcaacacggttgaaactttcgacagcggttttgaaggtcatggcgatcacgtggatgtagacggaatccctaaatttggcgctttaattggccagtcgcctatgcctacccattttaaaagcaaaagcggagagctgatgacttttaatgatggcgacggaacactggcggttgccaaagaatctgaaattactactgcgggagctaaatttaagattataaatgcaggtttgttggcacatcacggcgcaatggctacttttactaatggtacttatgctattactgaaaaagacaattcgataacaggaacactccctgaaaaggttaaaattattgataattccggtaagactctttttaatgcaacggttgctaccaaaggaattcacggaaatgcctcagatggaacctatgccgttttcggatcagcaagcggtgttcttgtagtggaaagtaacggaaaacaaaagcttattgcacttcctgctgattttgggacttcgtggtttggaactattctggaaacaaaggcaaaaggaaaatttgtgggttataccgctgcaaaaggagcttttctaattgatgtagcagctgagaccattaaacctattatccaaagtactacaatcatgcaatgcaaagtgagttttaatgcgactaaactgggaattctattgcatacgggcgaattcaaattgtacaatcttaccagcctgcaagttgaaaaggaagctaaagttattaccgaaactgctgctgatgcggcattaaaaccacaaatgcagttaacagagaactttggttatattacttctcccactacaggagaattattacaactgaatttgtctaccatggcaattacaaagaaaatcaaggtttcaagtacaccatatatgattaccgttttaggctttgaaaatagcaaaggccattaaaaagtaattctattatttattttatcaagaaggccggatcatttatccggccttctttactagacttcgatctaaaattgtaaatccgaagaaggaataaatctcgcgaagtcgcagagtcacaaagattttatattttttggcgttttggaaagtattactatttggatcaaagattaaaattaattcccagaatatcttcccaattcaacgacactcgcaaaaacagttctgcaggaacgcactattttgtagcaacggattttaatccgttgaaaataagataccgaatctcgctcaaatgcctgtcaatttttaaataaaacctcctgatgtaacttttatcggagaacattttactatttaacaaacaaaacactacttttgcaaaacataaaacaatgataaacaagtaactacatccgtaaaacatttcatttcactattattttatcacgatcaacaagtaggctcctcataaaaaaatataagttaaccccttaataattgagtactatgaaacaagtgttatttaaagatttaggcgaaagcagaaataaggatatttttccatcgcaagaaataaaagaaaatttagtcaatgctttttttccggaagatacattgacacttactcacaatttatcgagtgtaactgcggctttttatggtttgttattaaaaaatattggcgccgctttcggaaatgataaaatggatgagcattctaagaaattgttctatgacctcgggaaactaaaaaccatgcaggttttccaggcaaaccctacactggaaaaagacaccaggacatttgctgcagttgttatttatgcgatatacaactcaagtccggagtacaacttcagaatactaaaatacagtcccgaaaacacaattgtagaacttaccggagtcgatcggtatttaaaaattctaacagaactgggaatcgagaaacacattacgataccaacgtttttgccttttgttgaaggaattaaagaagttgtaaatattccttgtcagatcgagtatacgtttgaacaaacaaatcccgattttacaattaaatcggtgtataacattaaacaactttagtacgatgataccacaaccccaaagaaatatagtagaccttattggtgaaacttcgccctatttatttgaaaatgccgataaaattgcttttaaggacaatcctactgagtttccgcttcatcaaccctttgagtcatttgaacgggagaattttagtgattttattaaaatactcacaaccatgggaagtctaaacttagtaaaagaaatgaaaacggaggagaaaaattattttctggccgaaaagcttcgaataagaagaatctcgcaccaacaaccctctggattgttggtggccaaaataagtccacaattggaaaaccatcaaaaaggaaaatccttaattgaaattagagacgatgccaataccttgtttcaaatggaagttgattattacattttcaacgaaccttctttcaagaaaatatttgagcctcattacaatggcgaaactgatgctgctttcccgtcctgtaccctgcccgaaacttcattggagtatttaaatgaaaatgaatttaatgtcactgtaaatggatttacccgcgatcaatgcaaaggacattttgaaaactatcagattgtacccgccgtatatattgcgaaatgcatactgaaaaatgtctttaaatcggctcctgccaatactactgaaacagctgctgtagaaatcgagaacgtagaagcttttttaaataaagcaatgcctgtagataccgcttttaaagttaatgtaagcatctttcgactgcaaaagaatctaaaaacgtataaatgtactgtaaccgattatgcaaatgaatatggccactattttattacacttaaaaacttaataaactaaaatgttactccaaaaaagtacatccctacaaatactaaccatcagaatgaaacagcagttacctcaaaaaaaacaaacagaaaggccggataatacatccggccttttctatttttatgattcacagctactacagctcaccaaactggttaccaattctttcgatacactttgactgcgttggtaatacaaactcttaattccaagctgccaggcttctataagcagtcggtttacttctttaatgggtaaatcggctgggatattcaaattgatgctttgtccctgatcgacaaatttctgacgtattgcggcctgctgtacaatctctaactgactgatttctttaaaggttttaaaaacatctttctcttcttttgtcagctgggtcatgtgctgtacgcttccgccatttaacatgatctctctccaaacctcttcattgtcgagtcctttttcttccagtaaaattttaaggtatttatttttacgcataaaatttcccttgctcagaccggctttgtaataattactgctaaaaggctcaatcccgggcgaagtctgtcctaaaatagccgatgaagaagtggttggcgcaatagccatagtggttgtattacgtcttccataacctttaagcaattccggttcgccataaattcgagccagatcctgagtagctttatcggccttatcactgatatgttggaaaatttcggtagttttcatcttggcttccattccttcaaacggaatcctatttttttgcagatacgaatgccatcccagtacaccaagtccaagtgcacggtgtcttttggcaaatcgattggctgcggaaaggtaataattaccttctgttttttctataaattcctgcaatacggcatccaggaaaaagatcgctaattttacggcttcagtatctctccattcttcgtaaagctcgagattcattgacgaaagacagcaaataaacgattcatcaagactggaaggcagcataatttcgctgcacaaattgctggcattaatacgcaggtttttgtctttgtaaacttgtggtttgtttttatttacattatcactgaaaaagatataaggcaatcccttttgctgacggctttctaatactttcgcccaaatttgtcttttgtcgacatcaccatcaatcatttcctgcatccagtaatccggcacgcagattccggtaaacaaattctgaatcgggtttccaatacttttaatcttcaaaaattcctcgatatccggatgatcaacatctaaataagcagcaaatgccccacggcgaacccctccctgagaaatggtatccattgtagtatcaaaaagtttcataaaacttaccgctccactactctttccattatctgtaacagcacttcctctctcgcgcagctctccaaaataccccgatgttcctccaccaattttggtttgcataatcacctctcccaatttgtgggtgattccttctatttcatcgggaacatgcacattaaagcacgaaattggcaaaccgcgttcagttcccatattcgcccaaacaggcgaactgatgctcatccagccacgttcgatcatttctacaaaagattcctttaattcgggtttgtataatcgtcgggccgcagcggtacaaattctgtcaattgcaccttctacagtttctcccttcaaaagataaccacgatttaagatttgctcactttcagagtttttccaccacattttattctcggcttcacttaacggaaggctgtttgctgaagttgtatctattgtattcatcattgtaattttgctttttagaacaggtcgtttgcggtaatgcttttgtcgtgtttggtatattctactggtcttttggcaaagaaatcgtcaaggctgttggcaaaaacttcttcttcaaaccaggccatcgctttataatcatctgccggaacattaaaaatagtcgggatattgatctgaaccagactttcgtcgattctgaatttcatgaaattaaccaaatcagtcttcttgattgtttcaatttcaccttcttcaaaaatccagtctaatatatcggcttctacttctattgaatttttcacggcctcacgaataagcgttaacgtttcttcatcgaaataatccggaaactcttcacgaattttgtttacgatatagataccgccattagcatgaatctgctcgtcgatagaagtccacgcaataatgttactcacattcttcatatagcctttgaatcgcgtaaaagacaataaaatcgcaaactgactgaaaagcgacacattttcgatcagaatactgaacaaaatcagtgaaatcacatactttttattgtcctgagatttggtatccttaagcacatccgaaagataatcgacacgtttgcggataaccggtatctccatcagtttttcaaattcatcattgtaccctaaaacttccagcaaacgtgaataagcctcagaatgtctgaattcacattcggcaaaagtactccccaagccgttgaattccggctttggaaaatgctcgtaaatatttccccaaaaacttttcacggctacttctatctgtgcaatcgccaatagactattcttaatggcggttttctccgcagcatttaaatgagaatgaaaatcctgtgtatcggctgtaaaatcaacctctgtatgaacccaatacgctttatttatggcttctgtaaattgcaaaacctccgggtactcgaaaggtttataattgattcttttatcaaatatagacatatatataagtattaaatggtgactgaacctggataaaaatgcttcgttcttggggaggtataaacgacatttctataggtacaaatttaaccccgcgatcttctttcaccccttttttgatgttaaaaaacaacgcaattatcaacagtttgactccctgaaatcttccctcttttttgcgttttatcaacaggaggaaaataaaccgtaagagacaatacatcagttatttatactaaatctaaatagagttatcaacagcataggggctaaaaaaaggcttcgccctaaaaacagttatcaacagccattcttaaaaaaatagcttttatactacaaaaagtctcgttttgcacaacaagaaaaacgctgactactctcatttttgaaattattacactcgatcagccaaataaaaaagcacactttaaaacacacttaagtcactaataacaaacctattaactatttgaaatttataccctatagtgccaaatatttctttataatttatgaaaaaggcaattttttatcacaaatattgagcaaaattgattcatctgtaaaagttggtgtaattttgtacactaaacgcatttatcatgattatcagaaaagcaacaattgaagattcagaaaatattacagcacttttgctgctggcaatggaagacattatctataaatttacaggtgaaaaggatcctaaaacggcctactatttcctgcttcattttgttgaaagcgagaataatcaatactcctatcaaaattgttatgtagcggaggaagacgaccaaattattggtgctgttgctgtttatgacggaggacaattgcattcgttgagaaaaccaattgttgattatgttcgtctgaatttcaatgctgattttaatcctgaagacgaaacgcaaagtggtgaattttatattgattcggttggtgtgagtccaaatcatcagggaaaagggatcggctctaaactgctgcaatttttaattgacgagtatgtaactcaaaatcaaagaactctcggactattggtggaagacgctaacccgaacgccaaaaaactgtacttaaaattaggttttaaagtgaagggtaccagaactttggtaggaaaaaatatggaacatctgcagatttcatagttttttagtttcaggtttcaggtttgaaataggtgtaagacttacaaaatttaaccgcaaagtccgcaagtttttttactaaacaggattttgtaaaaaaaaggttcgcaaagctaaacttaaactttgcgaaccttgcgaaaatctttgcggttaaatcatatcacaattctattctcattccaaacctgaaacccgaaaacagaaacctaaaacctgaaacctgaaacttgaaacctgaaacttgaaacataaaacctgaaacttgaaacctgaaacctgaaacctgaaacttttctactcttaacaagatttttactaaacgtacccttcgaaatactgttaacttttgctaactacaacagtatcaaataaaaagttttatatttgcaccctaaaaaaataaaacttattgctctttaaggcctgtaatactgccttatactttaatccacatcgttgaaatttacttttaaaaataccttttcccgcaggaacttctttattttaggaattatctttattgtcctcacactgctttcgatttatattctgagcagttttataacggagatcaccgaaaaatcaaatactgccactgaagaacgaggctttctgaaaaaacaggaagtgcttgtacaggaattgtcgcattttttagaaattcaaaaggagttaaaacgtattgttgaaatgagcaatacccggaatctgtcggataatctaaaggtactcagtacaattcactccaatgacagtcttattaaaaacaattggtttcagattaataaggagcatatcacttttgtaactgctaaaaatagtccaaatctggaagcttccatcaaagattttgctgttaaaaacgggaatctcagtgcatacaattgcattgttgagaataagcaggattttttctggcgcatttattacaagtacatcgcgacaaatggtacagtcattcgatacgggtatgacattgatttgaaggcacttcaaacctatttttctaccattgaccaaaaagcactcaattatgcttttgtgtttgataaaaaaggaacaatcctctaccatcctgaagtaaaattgctgaagaagaatgttttcaaaattacagaccttcgtgccaatgatactacttttaccaataaaaacagtttcagccgacaaattgcgctttcggaatatttaggtctagacattgtacgctataccaaacgactcaatgtaaaaggaacggattggtacatctgtgtaaactttgcggagaaaatatccaatgaagatgtcaatactgtaaaaaagtatgcttccttaatttacatcgttacaacagctatcctaatcgtattcttctatttatttactcttttcactcgtaaaaattttcaggaaaaagaagtactggcacaggaaaaaaacaatcttttgatagaaaacgaaaaaattaataaagagaaagccctcattcagctgcagcaactgaaagaacaaatcaatccgcactttctgttcaactcgctgaattcgttatacatgcttattgaaagtaacacggctgttgcgcgaaaatttaccctgaatctgtccaaaatctacagatatctgattacgcccccggttaacaatattgttacggtacaggaagaactgctttttatcgaaaagtatatatttctgcaacaaacccgttttacgaaagaatttgtcttttcgattcagatcgaagacgaaaataatctggctaaaaaagtgccgtatctggcttttcagatcgcggtagaaaacgccataaaacacaatatcgcttctgaagaaacccctttaaaaataacaattgacattaaagaaaacgttgtaattattaccaataatttaaacgaaaagcaaaactttggcaaagaatccaagtttggtcacaaatacttagaaattatttacaaatattatgctaaggacgatttcaaagtcttcaaaaaagacggcgattttacttgcattttgcctttaattggataaaagaaaacattcactcccgaaaaaaagccactcactccattttgttttttttaacgttacccctgcaatatttttagccaaaaattaacctaaacttaactttcaatgagagaaaaggcattgttgataaacctaaaaaatatcgttttattggtattggtactgagcaccagtactatggtttctcaaaaaaagaataaaaagaataaagaagacaaaactgtacaagttaaagattcattaaaagattcaaaaggaaaaaagtatgatgatcttgttaaaaagggaactttcaagaaaggactttttaacaccattcaggtcaaaacagatttatacctggaaattaatgattctctttttcaaagagagtttttagtagtcaacaaaatatcgagtgttcctttgcctgttaatgatgccggattgaataaaggaatgaactacgagaataaaattataacgtttcacaaagatttagtggccaagaaagtttgggtaaaatcttctgttccaaaggtttcatcacctgttggggatgctattacggcttcggtaaacagtaatttctcagaatctattattgaagtttttgatattgaaaccaagaataacgattcgacttcggttgtcattaaagccaataaggtttttgacggtaagcaaaagagtttcaatgatgtattgagcaacattggctttggcggatctgtaaaatcggaactatcgtatatagaaaatgtaaaaacgtttcctaaaaatattgttgtaaaatcacaacttactacatctgtaagcgaaggcggtcctgccctttcggttactcttggagtgacgtccaacattattttactggataaaacacctatgcagccgcgttttgcagacaagcgtgtcgggtatttctctgaaaaacactggtatttcagcgacagtcagcatgctatgcaggagaaagaattaatcacacgctggagactggagcctaaaaaagaagatatcgaaaaataccgcaaaggcgaattggtagaacctaaaaagccaattgtgtattacatcgatccatcgacaccaaaacaatggcgttcttatattattgaaggggttcgcgactggcaggttgcttttgaaagagccggatttaaaaatgctgtaatcgccaaggagcctactgaggaagatactgattttgatgtcgacgacgtacgttattctgtaattacatatgtagcttctcaaaaatctaatgctatgggacctgcagtagtagacccaagaagcggggagattatagaatcggatattatctggtggcacaatgtaatgacttcactgcaaagctggatgcgcattcagacaggtgccattgatccgaaagccagaggaaataagtttagtgacgaacacatgggagaagcgatccgttttgtatcgtctcatgaagtgggacatacttttggtttaaaacacaatatgggtgcttcattcgcttatccggtggaatcgttaagatctaaagattttacagcaaaaatgggtggaacagctccatcaatcatggattatgcccgttacaactatattgctcagcccgaagatcatgttgaagcgattacgccaaaaattggtgaatacgataagtatgctatcgaatggggttacaaatggtatgcagaccagaacgaagaacacactgcgcttaacgatctgattgcaaaacaccagaacgatccggtttatttttacggagagcagcaggacggtgacagtacaattgacccgcgttcgcaatctgaggatttaggtgatgatgcgatgaaagccagcgaatacgggcttaaaaaccttaaaaaagtggtgggtaaaatccttgagtggacgtatgataaagatgaatcttactatcaaacgggtaaactttatattggagctattggtcagtggaatctttacaactatcatgtgctaacaaatgtgggaggaatttatctgaataccacggttcacggtgacaataaagcaagttatgttccggttccggctgccattcaaaaaagagctgtttcgtatttattgaaaaatagtattgcgcttccggaatggttgttctttaacccaattctggacaaaacaaatccattgaaagattctcctcttggaccatatgagtacactccttacaccctggcaagagaattacaatatggaattttatacaacctgttaagtgatgatcgtttgttgagaattacagaaaatgagctgttccaacgtaatgaaaccaaagaaaatgtttataccgtaacacaattatttaaaactgttcaccaaaacattttcgctcctacgattcaaaacaaatcgcttacgattatggaacgtatgacacagaaaaactatgtagatgtattgattgtttcgaccaataaactttttgaaaaaacagatagcaagaaaattattcaattagaagagactttaaaaatgcctcatttatgtgattatctgcaagaatcaaaaatggcgcgcaacatcaatcagtcttcattaaagagagtttccgaagtgacttctgacaaaaaaggagaattgaatcagattctgaaacttttaaagacgaaaagaaacattggaaatcaagagacaaagaatcactatttcgatctgatccagcgtattgaaaaagcactaaacaacacactttaaattaacataatccaaaaacaacccaatgaaaaatttattttacatgctgagtttcctacttaccctctcggggtttgcgcaggaaaggactattaaaggaaaggtacttgatgccaaagatggactgccgataccgggagtcaccattgctgtcgaaaatagttccgtatcaaacaacacctctgaaaaaggagtaattcaaagtgccggtctgggaactgtaagtgactttgacggtgcctttgaattgaaaataaaccataatatcaaatctctaagagtaacctatatgggttacctgccttatacaattgacattacagataaaaatcaatacaacatttctttaaagtcagatgtaagcgaattaaaggaaatcgtagttaccggttatcagaaaatcgaaaagagaaagctgacatctgctgttgccaaagtggatatggcagatatcaaacaagcgggtgttgcgagtttagatcaaatgttagtaggtcaggttgcgggtgttgcggtaacacaacaaacaggagctccgggaaccattgcaaaaatcagagttcgtggtactgcctctcttaacggtgcacaggatccgttatgggttttagatggtttacctcttgaaggaaatgacgttcctcaaaattatgacaaagacaatatcgatgttttaagcaatttttctatcgcaggtttaaatcctgaggatattaaagatattaccattttaaaagatggtgctgcaactgctatctatggagcaagagctgcaaacggtgttattgtggtaacgactaaaaaaggaaaaaaaggaagcatgaaagtagacttgaatgtcaatactttcatgactcaaaaacctgatttttctaaattaaatctattaaattcttctcaaaaagtagattttgaactttcgctggcttcaagagaagatttgacttacagagacggtaacggagaaatttcccgtattcttaaacaggctaatgaattaggagcctacagatcgggaggtttttcgtctctaagtccaacaacacaaaactcaatcaacgctttaagaaacatcaataccaattggggtgatttattgtaccgaagtgccatcaacaaacaatatacattaagtctatctggtggtggagaaaaatcagattactatttctctttaggagcttacaacgaacaaggtgctactatcggaactggttttgaccgatacaaccttaccttaaaaaacaactttgatgtaactgataaattgcgtgttggcgttggaatttttggtacacaaagtaaaaaatcatcttatatttcagatacggacacttttacaaatcctgctaattactccagaaacgcaaatccatatctagctccattaaatgctgatggaagttataattatgataaagacatgaccgggtatggaaatggaagtgtatatattccttttaattacttagaagaaagagaaaataccaattacgaattgacaacaagatctataaaagcattacttgacgttgattataatattacaaaaggattaaaagcaagtacacaaattggtttacagtttgacaacaatgcttctgaaaaatatgccggtaaagacacttactttacaagaaaagaaagagaaaaaacaagtgtatttgcaaatggagcttataattatttccttcctgttggcggaattattcaaaattcaaacactgacttttttcaatacaactggaaaacgatgttaaactataacactactcttggaggaaaacatgagttagaatttatggtgggtaatgagttaagaaaaaacaaaagcaccgctattaatacaaaaggttttggtttcgacccgaaaacattgactaccactcaaattgtttttccaactcaaagttatgcatctaatccaacctatagaacgtatttaaagaatgaaaacgaaaatgcatttgcatcattcttcgcaacagcatcttatacgtatgacagaaaatatacgttctttggaagtgttcgttacgacggttcagatttatttggtgcagatcctaagtacaaatatttaccattgtgggcagtttccggttcatgggcggtatctgaagaaaatttcttaaaagatagcgaaatagtttctaatttaagattacgtgcgtcttacggtttacaaggaaatatcgataaaaatacttctccgtatgtcgttggaacaaatcaaacaactattattttaccgggacaatcagaacctattattagtgtagcttctcctccaaatgataaattaagatgggaaaagacgaccaataccaactttggaatggatctggggttattcaacaaccgtattaacattataaccgatgtttacggaagaaaaagtactgatttaattggcttacaatcacttcctgttgaaaacggttttgaatatacaaacgctaactgggctcaggtaacgaataaaggatacgagatttctttgtctacaagaaacattgaccgtccgaactttaaatggaacacgactattaattttgctcataataagagtactgttgatcgtatccagacaagatctaacacctatttaccttcaagacaaggattacctgttaatgccgtatttgccttaaaaactaacggaattgatgaaagtggtttccctttatttgtaaataaaaaaggagaaactgtaaacacgcaagctctttttggtctttttgatccttatgcagattttttcccgggagttttctcgcaatcaaaacttacgaatgaagaaacaagagatttgtttacttatgttggagatgcagatcctaaatttaccggtggttttatcaacacttttaaagttcataattttgatcttactatcgctaccactttcaatcttaaacaaactgttgttgaaaaaccaaattttaatggtacacaattagatcgtggtcagaactacactacagatgtacttaatgcctggtcacctactaataccggttcaaacatacctggaattactagtccaacttcaggaacaggagattcatggatggcttaccaatggttttctccagcaggagcaccacttaatgtttacaactatttagatacttgggttcatgaaatgagctatatgcgtttaagcagcgttcgtttaggatattcattgcctaaaacagcgacaaaaacgttgtttatggacagtgttagatttagtatcgaaggaagaaacttatttgtaatcagctctgattataaaggttactttgaccctgaaacgttcggaaatatctatgcacaaccaatcccaagatcaatatctttaggatgtaacctaactttttaatctgatttaaaatgaaaaatatactaaaatacgtattctttgccggcgtagccattacaactgtaagctgtgatcattatcttgatgttgagccggtaggtaaagtaattccggaaactttaactgattatagagcagtaatgacaactggttattctacaactcctattcataaagcattatctactattagaacagacgaattggttttagatgaatctaatgataatgctactttctacagagatcattatatctggaacgatgccaatcctgataaaactaccaatagttttccttatgctgctttgtacaacagaattttctataccaatgtgatcatcaatgaagcaagcgtaaaattagcaccttctgcagagaaaaatcaattactaggagaagcttatgcactaagagcattatcttattttgatttattgaatatcttcagtaaaccttttaatgctgcaacagctgcaacagacagaggggttccgttggctttaaaaatagatttagagcaggcttacgttcctcaaagtgttgcggttatttacgaccagattttatctgataatgaagaggcaaaaaaattattgaatttagacactcaaacagcgggtatcaactaccgtttttctaaagctgctttatatgcaatggaatcccgaattttcttgtacagaaaagaatgggcaaaagctattgctgctgcagataaagcaatgacatacaaaagtgctttaatcaacttaaacactactgctgctttacctaatctttacaacggaccggaatctatattagcacttgaggatccttttattaatcttttgaaaggaacatcatatgctgcgccaactttaacaggtgcttatgataaaacaaacgacttgcgttttgcgttgtattatcaggcaagcggaagcagatacagatttagaaaaggtggtgatattgcacaaaaatgtacttttagaaccgccgaattgtacctgacaaaagcagaagcatcggcacaattaaacgatctgcctaccgcaagaacgacggtaatcgctttcatcaaaaacagatataaaactacggcttttgatcagttaagcatatcgattgctgccatgacacaaactcagcttcttgattttatcgctcaggaaagacaacgtgagtttgctgttgaaggtcaccgctggtttgatttaagaagaacaactcaaaaacaaatcatccatactttcaatggagaaaattacacactaatagaaaatgatccgcgatatacgctgccatttcctttagatgcccgattaaacaatcctgaattgtaagtctataaaataacttcaaagtaaaattgccccaaaattttagagaattatatacttacaataatgagcccgatattacatcgggctcattgctttttagacttatacggttatcaaggtcggagctatactaactaataaaattgaactttcagccatctatgtttaatgattttttaatagaaactcctgttttatgccttcaaatttctctttacaaaggggtttgttcagaaagcctattaccaaggggttactttctgcccgtttgagatcttcgggatgcgttgaagaagtaatcatcattataatacaatttagtttgattgattcagaaagttttgcatattcctcaagaaactcaaaaccattcatttcaggcatgttgatatcgagaaaaataaattgcggaagcaaatcaggtgtatcttctaacgaacgtaaatattcaagtgctgttgtggctaactcttctaaaacaatttcctcagcaaaataatacttttcggccattcgctttgcaatataacgatctgtagcactatcgtctatgacaaggatttttctaaagtagggttgtgttgtgttctgttccatagcttaaggtatttacttgtttgggattttaatcgtaaaagtggttccatgaccaatttcagattgaacttttatatctccattgagtttatagattgcttcttttacaatataaagtcccaatcctgaaccaaccgactctcgggaaacgcgataaaacatgtcaaatatttttggatgtaaatcttgctgaattccaattccattgtcctcaacaacaatattggtttcgatgttggaaatatcaattttaatattgacaaatgggtttgaaaccttaaaattttgatagcggattgaatttgaaatcagattgttcagaatagtcgtaagccggtttttatcggagtagaccgaagcattaccaataatatcaactttaaaatcaactcttcggttagtatctcccatgaattttaaattttgggttacctctttgataagttctttaaaattgatcttttgcttctcgatttccatccgtgagtttcgtgaataatccagaatatcacaaatgaaattatctaacttttcggcattctcctttaacatttcaagatgtccaatcattaactcttcagttgtatcgtctttggctatttcaataagtccaagcatagaattcaatggagcacgtaaatcatgagaggtactatacacaaaacgatccaattcgtaatttgccgtttttaattcctgattttcaatttctctttttttaaaggtctgattaatatgagcttcactgtaatttttaaattgataagcccacaatccacaaagcccaaaaatggtcgtggctaatagtatgtgaatcacaaaagtgcgcagtgtcatataatccaactgagtaaaataaataccactgacaccactatattgcaaataaccaaatagtgcatgatgaattattactactaatgttagcggtatttgcagtttccagttttgataagtgataagtattgcacttgcaacaaatgccgtaaaatgcatctcaaacataccgtgcatctgataaataaactggcacatgaaaatccctaatacggtactgagaacatactgataaaagtcagattccggcaacgctaattttgatgaataataagcaataagcaatattccccccactccaattgcaatctcccaggtatcataacaaaacgctaataataaacctataataaaaaaagcgaccagaaagtaattaattaaattatccgattttctctttattgccaaaagaaattcctgaatgttcttagattgttccagattttcgattttctctttcatacttttttcaatttggtactgcattgcgatactcttttaaagtaaaagcaattggattaaaaaaggacaagaaaagcagttttatgcttagtttagtatgttcattacttcattcgcttcagcaaatgaatactaactttcagataagagattttgatgaactctacttgcgctccattattatatctccaaagcgaaaaaaaatatacctgaataaagtagtcgtctcatagtacatcaatctttaacaaaaagctgacgaacaataccattaaagctttagctaatttaataaaaaaaacgataaagtaggattttatctcttataatatatctaaaaagcgggtaaaaaacctcaatcaccatagtgaaaaacatttgataatgaggtggttaaatacaaaaattcatgaaatcgtttatatccaatacaaatacggctaatgctaatgtagactgccagaagatcgtatactgcacatttctgacagcaaatcaattgtaatgctataaaataaacagacccgccaaattagggcaggtcaattttttaccattttatcttaacattatactccctaattcaacctgataatgtttcgggggtaacccatttctatacaggtcggtctaatcgtgttcaggttcccgcaaatcaaaatattctccttgcgttttatttaaagaacccgaaatcattttgaaattttcatctgttggctccagattgatatatttatcgacaatgcttctatgtttgtatacgataaaggtgttttttacttttggatttatcttattcaaatcggcttctgttacctggtctgtaaaggacggaacaaaggttaaagctatatttttaatatgaagcagcttccctaagttctccaactgaagctgccgctggtttttagagtaatttttatggtttccgtatacaaaatagactttgagatactgcctgcgtttttcgctttctttttctaaaaacaacagccacttttttatagctgtccaatcaggattgttacctgcaaagtaaataattccgtgataacgtccatacttacaaacgggacaggtttgtgttcctttgtccggaccaaatgcgtgaaaaggcataaaagagggctgatcttctccaatatttaatcccgaatgaagtagtgctggtgttttcttaggataattcggaatatttaaccccaaaacaatatcatgttctgcaatctgtaaactgtcttttaacaggacccttacaataccacttccgcctcggttttcaggaaggtgcttctttctataagcaaggagtaatttatcatcatcaaaattaatttcatctgtataatactcctttttaacatctggttctttgaccgacaaatggatgtgtgccggcaaaacatcgttgggatacggtgccggacgaatggttcttatcgtgtattttcctttagcatctgttttgacccaaccgcgaatatgcccatgccgtttgattgtttcgtccattccgggtgtgggcgaataatatccgtcgttatccgtctgccaatagtaaataattacatttggtgctactgttttaccgtccagttgaaagacagtaccggtaacgattaacttttgtcctttttcactccatcccggacttgtgctaacagaagaaatttcttttgccatttcgatgtacatcagttcacagccatcacaccctccacctacagtattactatttttaatctgaggttttggattattttgtccgttacaactgctaaacaacagggctataaaaaacgttttgcaaatggttacttttttcattgtagtacttttttctgcaaatatcaggatggatatagctgactgtcaaatgaaatacagtaagacgagtttattttaaggtaagctgattgtgttctgaaaattttgatttaaaatttttagcataattgcgactgacccttaaaatagtatcctcacagagtgtaacatcatagtccccattttggcgggactgtatagatgaaatcttgcttatattcacaatatgtgatttatgaatacggacaaattgtttttcatccaattgggtttccaaagctctcagtgtttgagtatgcaggtattttttagaagaatgataaatgttgatgtatggtgaatttgcttcaaaataaagaatttcagctgcttccagaagcagctttttattatgaggatcagaaattaaaatagagcgtataaaattttgccctttcctttgctcatcgatcttttcttttaattgcaaagactcgctttttctattccataaaataaagaccatcagtgaaaatccataaatgattaccgtttttataaaataagccgacaaaccaaaattgaaagtctgccaataagaaaaggtgtgatcgtagaatgcttttgaaataatccagaccaatatcggataagaaaacaaatgaagaagaattgctgcacttattaccagtattcttaccgtcaggttttccgtttttctgatccattttaaaacaactattagtaaaggaagaaataatacccagtaggaactgaacaatagcgattctgaaatgtagaacgcactattttgaaacagggtaaaggaataatccaatactacgtttgtaaaaacaaacaacagtacacaagccgtaataataaaatttggcttttgcttgctttgaaaaatttgatctattactgactgaaacatcaaaatatagtgtttaggaccaatttatagcgctaatgaaaatacatttttactagtttgtacgattcaaaataggttatataaaccacaaatttagtaaattaaccacacatctgatacattaccgacgttctgttagtcgtctctatactatcagattttacaatttcacattctttttcaatcagttacacaactgctttataaaacaactgatgtaaaacattatccattcaatacctgcgccagctgggagataagaaattttaagcccgtgtataatggaatggtctttttgtatatttttggtttcgcaataaaacaagttataaagaacaaaaaaacacctgcagaaagccaggaaacgttaggagtaaatatagaaagcattacgatgaaaaaaattatacttaaatttacaaagtgggcacttctaatttgcctcgcaatattcatagttaaaggatgcattccgacaactcctgatgtacctcatattacacctcgcgcaactactcaatactggaatttacctacaggttcaaaaattgcttatacgcacattgcaggcaaaggagaaaaaaaaccatatccaattatttacctgcacggtggtcccggaggatatgtctataccaaaaatattgaaacattaggaaagttttctgcatcgggctatgatgtatatttatacgaccaggtaggttgcgggctttcggaaagactggaaaacgttagcgaatatacagctgtacgccatgtaaacgaccttgaagcaattgtcaaattattaggtgttgaaaaagtaattctggttggacaatcctggggtggagcattagcagtattatattccgctgagcatttggacaaagtagacagaattgtttttacttgtcccggtgcgattaaacctgcaaatgaagcgttagaaaaaattaaagcacccgacagcctgaatttaaaagaaccatacaatccaaattcaaaaatacttccaattgtgcttcaaccaaggtatgtatctataggaatttgggcaagattttttggaaaaaaactggctaatgataaagaagctgatggttatcttaccggtatggctaatgtttttacgaaaggtcttgtttgcgactcaactaacgtattgaaagaagaaggaggtgccggtagttattgtaatttaaatacaagtgtaagttatggtgatttaaaggatcccagaataaaactgaaaaacaacaaaattcctgttttggtcatgaaaggacaatgcgataatattgattggggctatacgaaagagtatcttgacttgtttagtaatagcacgttcaaattaattccaagtgcaggacatcagatttttgcagaacaacccgaattatataccaaaacaattaaagattttttaacccaataagattatcaacaaaagaaaaatgtgtaaccactgtacattgcaagacactaaggtttcacaacgctccgtttttttttaactttacaaaaaataaacgaaatgaaaatagtcatcattgaagatgaacatctcgcctctacctatctcaaaaccattctggaagagcagactatccttccgatcagtgaaattacagtactgaaatcggtaaagggtgctgttgccttttttaaagcgaatgccgttgatctggcatttatggatattcatttgggagatggtaaaagcctcgatattttcgagcaggctctcgtgtcatgccccgttatttttatcactgcttatgactcttatgcggtaaaagttttcaaacattttactattgattatctacttaaaccttacgaagaggaagaattactcgaagctttgcacaaatacaaaaacataaaagaaacctttaacagcaattcagttgttgaatctttggttgaaattgagaatcaaagcaacattcagcatcattttttggtgagccacagagacaaactaatttctgttaatgacacttcaattccctttttctttgctaccggaaaacacctgtttatccacaccaactccggcagtagttatctgtacaataataatttgaaagacctcatcaataaacttgatccggctcttttctttaaaatcaacagaaaatatattatcaaccgtcattctgttcaggaaattgtaaaacattcgagccagaaaatcgaaatattactgaatgttaccgttccggatacagaatctattattttaagtaaaaaggaaatcaataattttaaaaactggctcgattcctaaaattcaattcgagtaaagaatatagatttccagattattcagaatccggaagtctgtcggcttcattcttttttcggttgaaacggtaaattacagtcaatctgatatatcttccctgagaacgaaactctgattctaaataatagaggggtgtactgaccgtttgtttggttagttgcgaattgaaaaggttgttcacgtttaaagtaaccgacattttatcgttaaaaaagtccttgtttaaaccaatattggccgagtattgtgcctcagtaaccgattgaactccctgatttttacctcggtatttaaaactaaaatcacctgaaattatttttggaaacttcacaaccgaacgaaagcccgacaaccaggtttcatcttccacatcatagaccacctctttgtaagtgccctgctgtttgaatttgtagtaattaaaatccaaagacaatctcagccattttgtgggactgtaggtagaagaaacttctgctccgtaacgatcttcggtgtccagatttaccggtgttctcacgaaataattttcatctgtacgctgtagaatatactcgaaaaaatcggtagtgtgctgatagtatacagacggattaatactgaattttccgggtttggccagtaaagtcaattcaaaagaattcgtaaacatcggattcaaatccgggtttcctacagtaagattgcgcaaatctgaaagcccggaaaaaggattcagctgccaaaacctcggacgattgatccgtttgctatagctaagctgtaagtccgttttttcggttagattgtatactaaatgaacggttggaaacagattgatataatttttagtgttgctgaacaagttcttagaatcggcaatttttatatcggataattctgcccgcaaacctgccagataactgaactttttaattttactcccaaactgaatgtaaccactatagaggttctcgtcgtattttaatttattggtaaactgatcctgcagcacctcatccaaaatcgtataataatcacttctgatggcgcgtaaatcgcttctgattcccatctcaattttagaattttcgtttatcggatttacaaaatcagattttagaaagatatcgttactgctttctatatcgcggctgtacagattagaaacttcgggttcataaggcatcgttttttgctgatcgatgtattgattttcatcgtcgtgccaaaaatcatattgcaggctggtcgtccattttttatcctttttatcaaatgtttttacataatttaattctaaggcattgtaaaacttaggttccttataattttcatagcgattgatgatactgtcaattgcatgattggcattggtatactggtacccaattgccgttttataattgttattgtttctgtcgcgatagtaacttcctgttaaggtatttttggcattaatgtaataatctcctcctacgtaaatattgtagatgctattatttcttcggatatcatcgtattgattcagcgtggttactacgttgttgctggtattgcgctgaaactgtctgttggaagcaaaaacgtcaatgtaacggtatcctatattggaaaacaaattgactttttcggttttataactcacattggcattcagactatgatttgccggattccctattcctgcctgcagcgagccgttgaatccctgcatactgtttttctttagtatgatgtttataattcccgcactcccctgcgcttcgtaagccgctgaggggtttgtaatgacttctaccttttcaatattccccgccgaaatttgagataaaccgttattggccgttaacatggatggttttccattaattaaaaccgtaacaccgctattgcctctaagacttactgccccggcaatatcgacattcacagaaggaacattattcaaaatatcattggctgttccgcctttggagagaatgtcttttccaacgttgaatacttttttatccatttttagttctacggccgatttttcagctacgacattcacttcatttagttcattgacttcttcttccagtaaaacgtcttttaaaatcaaatctttctgaagtgaaatcgcgtttacggtgaatggtttgtaggacatcaattcgattttcaactgataatttccgggagaactcttgaaaacataaatcccgttttcatcagaagaaactgttctctttttctgatcagacgattccagcgtgacggtgacatagggcagcgattgttttgttttggagtccataacttttcctttaagcgtaaattcattggtctgtgccacagcttcaaagcctaaagaaaggaggatgagtaagatgagctttttcatttttggtttggtttataattttcaccaaaactcttctttaattgtatgcgaaaatcaagcgcatgctatacagttctttccgatcgataaaccatttaataatgagtattaacggtgtttatcttcgctttttatgcgttaatgccttttttgaacctgtttgtcgacacattctttctctttctaaataaatactaactttggtctactatgtcagtattcgaaaaactcatcaactattcctcagcacacaggcttccaacacacattatgttttggttttgcctgtatatcatgttccttggtaaaaacaattttgatgacccttcttttaatcttccatatgaaatgctgggaattgcattcgatctgtttttctctatcctgtttgcctatttcctttcctatcgcattcttccgcgcttaatgacgcccaaaaatcatagtatggtctggcttgaatttatagtgggctcttatcttatctcggctattaaccgaaccatggtcatttatgtactggaacctattgtacgtaaacctccttttgaacaggaatctgtttttgaaatctttacagatgtttcaaaactgtttcgatcgtattttatacaatccttttttctttctttattttttgtttttgtaaaacaggttaaaaacctctatttagttcagaaaaaagcattattactggaaaaacaaaaggcagaaacagagctaaaagtgctaaaagctcaattgaaccctcattttttgttcaacacgctcaacaatatttattcgctttcccttgttaattcaccaattacctcaccatcaattgccgttttgtctgaaatattagattgtattttgtatcgctgtagcggcacttatgtacctgtttcgcaagaaattgcattgctgaacaattatattgcacttgaaaaattgcgatatgatgaaaggcttagtgtcatttttaataccgaagtcgaccataatgatgttattgcgcctttaattttactttcattagtcgaaaatgcttttaaacatggcgccggagaagatacggattccccaattatagttatcgatttaaaactaaagaacagtcattttagctttacggttaaaaacactattgggaagagtgaaactgaatctgaaaacggtaaaattggactgaacaatatcatacaacaactggacaaaatttatccggaaaactatacttttgaggttaccaaaaacgatactcattttacagcccatttagaaattaagctgcaaaacgattccaaccaagcttagaacaatgaaaataagatgtttattagtcgatgatgagcctttggccataaacctgctgcaaaatcacatcagtaagctggattattttgagattgtaggaacctgtccgaatgccttaaaagctgccgaagtattaagaactacggctgttgatctgatgtttctggatattaaaatgcctcagatcacgggaattgattttttaaaaacattaaaaaaccctccggctattattttcacaacggcttatcgtgaatatgctttggaaagctacgaacatgatattgtagattatttactcaaacccattacttttgatcgcttttttaaagccactgatcgttatttacgcatcagtggcccaagcaatacaaaaattataacgccgcctcttgagagttttatttacatcagaagcggtactaaattccacaaaatcaatacagacagtgttttgtttattgaaagtgtgaaagactacattgtggttcatcagaaggaaggcataaaactaacctctaaatacaaaatcggcgatattgaagcagaacttcagggaaaagattttcttcgggtacaccgttcttttatcatcaatttaaaaaacattactgcctttaccgcttatgatgttgaaattggctccatagaaattcctattggagcaagctataaagaatacgtttttaaaatattaaaaggttcataacctcatccctacttgtctttagaacttaatagcaatttttcctatagtcttccctgactctaaaagttcatgtgcttttttgaaattcgctgctgttaaacctgttagcgttacatttagcgttgattttagaatgccctgatctaaaagatctgccagtctattcaaaataacgtgctgttcctgcatatcatcggtttcatacatcgatcgtgtgtacataagctcccacgagaaggaggcacttttatttttcaatttgttcagagctacgggatcactgcttccggtaatagaagcaatatgtccttgcggtttaatcaattcgaccatagtatcccaatacgaattcgtatctacaaaatctaaaataaaatcgacctgttgaaacccggcttcctgaaccgtagcaattaaatttcggtgatcgactacataatcggctccctgctctttgcaccaggctatagtttctgggcgggatgcggttgcaataacggtgagacccgctacttttttggccaattgaatagcgatcgaacctactcctcctgcccctccaataatcaaaatcgacttacccttatctttttcaggattgattcggatacggtcaaagagaatttcccaggctgttaaaccagttaaaggcatgactgccgattcttcaaggcttaaggactttggttttctgcctacaattcgttcgtcaatactttggtattcggcattgctgcccggtttggtaatatctccagcataaaacacttcatcacctaccttaaacaaagtcaccttctctcctattacctccacaatacccacagcatcccagcctataatcttcggagtttctaaaacggtatcttttgtactattctgacgaattttaaaatcaacgggattaaccgatactgcacttatttttactaacaaatcacgttctccgggaactggttttggagttacaaatgctataaaactctcctcttcagcaattggcaacgatgttttaaatcctatggctttcatctttataatttttaagttctattattattacaaagataaatacagtccgaatcttacaaacggtataattttatactaaaccagtatatttttatcaaaaatcaatagcactttagaattctcaaatactaagaagctggtcctaaaaccagcttcttacttttactatttaaaatttagcggcaaattcttttgcaaaatcttccagtttagttcgtccttcaacagcactataatcgcctaaaaaatgtgctgcaattttaccgtttctaaaacctgatcccatttcggtatacaattcagcaatttcttccggtagtcccgcttgtttcattccgtcaagagattgtacatcggtaaattctatccatggtaaatccggttttccaatggctgagcctaaagttttggctacttcatccggagttcgcacatcacttacaatataacgaatgttctttcccgttatcgtttttagtaattcttcagacactgctgtggcaatatcttcaggatgtacaaaaggaattgtagtgttagaaggataatttgctccaataattcctgctcccttaatcattggaacatcatgatacaaattcgtgtagaaaaaacccgcacgaagatacgtaactgatatgttctctaatgactcatataatttctcgatattatgaagtccggcaattggaccatttcctcccggtaaatctgcaccaatgctgctcagcattaccacacgttttactccggcagctgctatggcttttgcaagtgctttaccggcgtccgtagtattggtaacgatattaactcctcccatattaggcggagtcattgcaaatacagcatcagccccttcaaatgcgctttgcaaaaaagcggcatcacttacagaacctatcgctgctttggctccagctgcttcaatcatctttacccggtctgcactactactgattactgttacctcatgtcccgaggcaataagtttttgggtcaatggcttacctatgtttcctaatgaacctgaaattgtaattttcatctttgtttatttttttatgttctgtaacaaaggtatatttgtacttacttttgtacaagtacttaccctaaagtatgcactatgaccgcaatcaaagaatcatcgactattcaggaaaacaagcaatatgctttagaccaatgccctgtaacttatgttatggaaaaaattggaggctattggaaacccattatcatttaccatctttcaggcgggagcaaacgttacagcgaactaaaaagggctatccctgcagttaccgaaaagatgctgatacaacatttaaaacagctcgaagccgaccatcttgtcattagagaagctaaaccggttgtacctccttttgtgacctatagcttaagtccttcgggaaaaggtttaatgcctgttatcgaagctatggcgacatgggccttcaaggataaggaagatggatttaagaattcttaaaataatttgatctcaaaaataatcatcaaagtagcagtacatcttgttatctttacctaaaaagatccaaatgagaaaaattggtgcaacacaagcaggtttcgttttaagaattgttttaggaattacgatgctctctgcagttgccgaccgttttggtctttggggcgctcccggtgctcccggagtagcgtggggaaactgggacaattttattgtttacacccagaccttaaactcctttgcgagtagatccctagcagaagtattgggtgctttggctacttttttcgagattttgtttggtttgtttctcatcataggatttaaaacccgttacattgctttgggaaccgcaggtttaatgcttctttttgccttctccatggcggtttctgtctctgtaaaagctccttttgattattcggttctaacaagtgctgcggcagccttattgctttcttctttggacaaaacgtatcttgctttagacaatcaatccctataaaaatttatacaactcattcaaaataaaaaatcctcaaaaaataactacccgcaaaaagaccaaaatatttggctttcaacaacctgcttacctcaaatacaaattttgtaaatcgcaatacaaattatataacaattcccaaatctaaattctcaatttaaacgtatgtatgaaaatacgatactccggaggaattaaactcaaatggtaatggtttttggggcatattgagcttaataacctcccgggatatcgtttattaaataattttaaacgaaggaaaagagtggaaaagttaaatgtcgagagattaaaaaacagtctggattacttgcaaagcaaacaaagggaactaaaaaggcaaaatgaggaagatacccgaactctcgaatctctcataaagtatttaaaaaaagacatgattgatcagtataaattaaccaaatacgatttatacatcaagcaggatgttaaggatacggagacttttatccatagtgtgcaaaaaataatagaagacaaccagtaagttcttcaaccttagcgcatcatcaacctccctgattgttatttaaaaatcaatcagttagaatcattttggcattatttttcttcctttatactttaggatgctgccattttagtttttaattaagaaataaaaaagttcctctcccaatttcaattcgtaaattagcggtaacaaaatcgattcgaatgacagtacttacgtttaccctgattatgattcttggtgcttttttagcaggttttattggctcattatcaggtttaggtggcgggattatcataattccacttttaacagtcgttcttggcgttgacattcattatgcaattggtgcggctctggtttccgtaattgcaacttcttcaggttcagccgcagcgtatgtgagagaaggaatcaccaacatgcgattgggtatttttctggaaattgccactacaataggtgctgtttgcggagccctgctttcaactatcgctcctacttcgtttattgccgttttatttgggctaactttaattttctcggctatcaattcgcttcgtaaaaaagaagaacatattgtattagaatctagtcctttggctaaaaaactaaaattagaaggcacttatcccgcacacgatggcaaagttattcattacggaactaaaaatgttataggaggttttagtatgatgggaattgccggaatgatgtccggtttattaggaattggttccggagcttttaaagtaatcgccatggacaatattatgagagttccgtttaaagtttctactaccaccagtaattttatgatgggagttacggcaatggcaagttctgtcatttacattcagaaaggatacatcgaacctggaatctgtatgcctgtagtggttggtgtactttttggagcgatggcaggagctaaagttctcgtgaaaacaaatcctaagaaacttagaatattctttgcctgcctcatctttgtattggcagtaaatatgatctataacggaattaatggaaaaatctaagactatgcaacacgaaaaatttggagaaaaagattttcaaaccattatcggaaatttattgcgctatggcgtctggatttctttatccgtagcttttattggtggaattgtttacttactgcatcatagtgcagacattgaaaattattcggcctttcatgaaaatgaccgtaatatctttgaagtaatttcggcaatttatcagggtgtaattcagggaaacggtgaatctttaatcttttttggaattattctgctttttctaactccggttttacgcgttttactatcgcttttttcgtttttactggaaaaggattatctgtatgtaggcatcaccttaattgttattgtgattattctgattagcgtttcctttggtttttctcattaattaatggctataagccgtaagctttaggctttaggctttcttaataacaaccaaacccgacaggttttaaaaacctgtcaggtttactaagcgataatactctactaaccacgataagcattgggttgtaggctttctaaaaaagcatattgcttaaagcctaatgctaaaaagatactaaccgcgataagcatttgacaataggcttaataagaaagcatactgcctagagcttaaagcctaaagcctaaaaaaaaatggaaataggaattgacagtttcgcttcggcgatgtatggagaccacaataccttaagcagtgttgatgcaatggaacagctgctgcaaagaatcgagctggcagatcaggccggacttgatgtttttggaattggtgaacatcataaaaaagaatttttagattcggcaactgctgtgattttaagtgctgcggcggcgcgaaccaaacgcattcgattgtcaagtgccgtttcggttctaagtgctgccgatccggtaagagtttatcaaaattttgcaacacttgatttaatttcaaaaggaagagccgaaattgtagtaggccgtgggtcttccattgaagcttaccccctttttggttttaatctgaatgattacgatgaactttttaaagaaaaattagacctcttacttcaaattagagacaatgaatttgtgacctggtcgggaaaatttcgcccttccataaataatcttccggtttatcccagagctttgcaagaaaaacttcctgtatggttgggtgtcggcggaactcctgaatcgtttatccgggccggatctttagggcttcctttgatggtcgcagttattggtggtcagactcatcgttttcgtcctttagttgatttgtatcgcgaagcagggaaagcagccggttatctgcccgaagaacttcaggtaggtttacattcacccggatttgcagcaagcactaccgcaaaagccattgaagaatattatcccggttatgctgaactttggacaaaattaggtctggaacgcggttggccgcccgtgaccagagccaaatttgacggattgattgacgatcagggtgtactgattgtgggagatccggaacgcattgctgataaaattttgcgtcacagcgaatctcttggcggtatttcaagattcacctttcaaatggacaatgcaggtctcacgcatacacagctcatgaatgcgatcgaacttataggagcaaaagtaattccgcttattagtaaagggtagttttttaccacagattgtaccgattaaaagattttcttatttcgtaataacaaataaacccaacagattgtaaaaatctgttgggtttacttttaaacacttagaaccttagcacctcagcgccttagtacctaaaaaatcagaacttatacgttacccccactctaaaatttcttggtgcttctgtttgccaatagtaagcagaaagccattcatagtaagatccactgtacaggtatttgtccagaatattaaacacatttgctgtaaccttaaacttcccggtttcataagataaacctccatccagtttaaaatagttgggtaagctgatacctcctacactccaactgtccgtttgacggcctgcaagataagtccctcctatagaagcccccagtccttttaactttccgctttgaatgctgtagttcaaccacgcatttgcactatgcttagcaaatcccggtacaactgaacccaccgttatttttggaataaccgaacttgttactatagattctgtaaaagcataattagcaacaagattaagtccgtctaataaccttcctctaatgtcaaattcaataccctccgctcttttttctcctaaaacaattttataaatatcatttggtccgttcgttggatcggcagcaagttcattctgttttacgattctataagctgctaatgtagtactccacgatccgtcaaaccaatctttcttaattccaaattccacattatttccagttatcggttttacctgatcaccatttttaataattccggactgcggtataaatgcctgatcgtacaaaccataaagagctaaattatcggtcacagaataactaaatcctacacgtggtgtaatatgactatcagattcaattgttccccaactgttttggctaatccaggtatatcgtgctgcaagagtcaatctcaatttattctcaaagaaaccaagttcatcctgaatataacctgctgcgtattcttgtgttaatttaccaccagctctgactgaaagcggtgttgtacgattgaaaacgggaaaaccgttagaaggcgtcccgtaatttggattgtaaacattaaatggatttgcagctgtatcaagatcatgagactgtccccaatctgccatataatctttacttcctaaatctacaccgcctaatagtttatgcgtaacttttccggtattgaacttcccgtttatgaatatctgccccaaatacatattactttctgcatcccagatacctacgtttctgataatattcccttttccaagagcattttcacttgaaccaatggcactaggccatgaactgtacccttgctgaatgtatttgaaataagaagtttgtgctgtcagtttccagttgtcatcaaacttgtgctcaaacataagatatccgctatgatcctgaatattagtatccggtatacccggttgtgtcaaagtaaatccaaccggtaatgtggcatatccttcagttttaggtccaaagacataataagatcctacctcagtcatgttggcatactgaaagttgtactctgctgtaatttttgttttatcatcaacctgatacgtgattaccggagcaattacatagcggttattgtgttcaaatgcacgatgcgcacctctgttttgggcagcagcattaaaacgatacaatagctttccttttttatccagtttcccatcaagatcgatactcgctctgtaaaaatcatagcttcccgccattacactggcttctccttttgtaattccggttggttttttagtcactacgttatacaaaccacttggatcaccaacggaaagcataaatcctgcaggtcctttcacaaactcaatatgatctacaaaactcatatcttccgtaagcggtccccaggaagaagaaactacgttgaaaccattacggaacgcctgaacctgtgaaccacgcatttttatattcgtatacaaatctccccagtgctcagaacgtattgccccactcacatttcgaattactccgtcactcatacttacaatctgttgatcttttaatgtctgaccactcacaatctgaatattttgtggaatttccaatacaggtgtttgaagacgtaaggataaagaaggcttgtcttgcttgtatttgtttttagtaattaccacttcatccaaatcttcctggctctccgaaagcatgaagtttttagttgtcgtttgctttgatgtcactgtaattctgtcttcaacgggacgaattccaactgcactaatgctgatagtataactggcaggtttaacatttttaatttcgtactgtccgtgttcgttcgtaatagcactgtaccttgttcctctaagagcaacagcaacattttctgccggcacatttccggttaaggaaactcttccgattacttttccgtgttcctgccccatcatcactaatgagtttaggaaaatcagaaaaaataaaactttttttattctcatggtattcattattattttttattggtttttatatcgctggcaaaagtaagggctaaaacatttttttgcaaattatttttaattattctaaataaatataattaaaaaccaaatccttgaatatcacctcaagacctatcattttggattataaaatcatcaatagtaaataactctgcttatctttaaggacaaaaacacaatctcaattatgaatcacactaacacaatcaaaaaagtagctattgtgggatacaaccgtattccgtttgcaagagctaatactgcctacgccgaagttggaaatcaacaaatgatgaccgctgctcttgatggtcttgtcacccaatacaatctgaaaggaaaattaatcggtgaagttgccggaggggccgtaatcaaacatacttatgataataatctaatgagggaatgtgtcctgaaaacaacactagatcccgctactcctgcctgcgacttgcagcaggcctgtgataccggaatcgaaagtgctatttatattgccaacaaaattgcactagggcaaattgaatgcggaattgccggaggtgttgattctataagtgatattccgatggcggtgagcgataaacttcggaaaattctactccatgtcagaaatgcaaaatcgttaatggagaaaataaaattctttctaaaaatccgtcctaaagatttggccccgctggttcccaagaatgaagaagttcaaaccggactttcaatgggaggtcacaccgaaatcactgccaaacattacaaaatctctcgggaagatcaggacaactttgcgcttaaaagtcatctgaatatggcgaaagcatacgatgacggcttttttgacgatatgattactcccttccacggacttgacagggacaataatttaagaaaagacagcacgctcgaaaaattggccaggctaaaaccagcctttgacaaaatcaatggaaccttaacggcaggaaattcaactccgttaacagatggcgcttcctgcattcttttagccagtgaggaatgggcaaaagaacatgatctgcccattttagcttacatcacctttgctgaaattgctgccatcgaatatgtcaagaaccagcagaatcttctattggctcctttgtttgctgtcagccgcatgcttgataaagcaagtttgaccttacaggattttgattattacgaaattcacgaagcttttgccgctcaggttttagccactctgaaaatctgggagagtcctgaactaagtactcaaattggacttcctaaaacccttggagcaatcgatcgcgaaaaactaaatgtgaaaggaagcagtcttgcagcagcacatccctttgctgccacaggaggtcgtatcattggtgttatggctaaactgttaaacgaaaaaggatccggacgcggactaatttcaatctgcgccgccggaggacaaggcgtgaccatgataatcgaaaaataattattcctatcgttacaaacaacaaaccggacaggttactaaaacctgtccggtttattgtttaaaaaaattaaaactgtaacaaaatcaaaataaaagtctctatagtataaaaaacgctaatccattaatccaaaccttactacatgagaactttaaaacttaccactttactcattttcactttcttttcattttcgaaaataaatgctcagaccactccaaacgacagcataaaactggattacactaaaatctactcgctggctttagatgggaatccaaaatcagctttgccactattggaaatcgatcccaataaaaaaatagcggataaagactcaaaattcaaaaccaactttgaaaaccgatttaagtttgcagaagacaaaagtgattttctggaaacgcgaaaatcaaaaatagatcagttgttaaagatttacagagattactggcgtttctctttcttaaacaaagaaaagaaaaccgatacactgatcctgaaaaacgtttcgaattttcttaaaacgaattttccgtctgccaaaaacctaacgattaacgaagacagtatcaatgtctatcaaaaaaaatacatcgcaagtttaggttatcatacgaccggatttggaaaaacgggaggtttatatgacttactggtttggaaaacagaaaaagacaccatctataaagttacctatgatggaaaagaaactccaattaaaatctattttatggacgattttgtcaccctgggctggagcgaatatgctactctgggacgctattatcctgcgggctgggccacaaaagaagctttgttttgcgtaaaaaaagcctatgacttaaaatcggaaaattttagagtaagctacattggtcacgaaggaagacactttgccgattataaactattcccaaaattaaaaggtgttggttctgccgatctggaatacagaggaaaattaactgaagtttctctttattctcaggaaggtctgctgaaacgattgcagttttttatcaataccggaaactatgatagcgataatggtcattcaattgccgcttattgcgtgataagagatttatcaagagttttgtttggaaacgatttcgaaaaggacatcaacaaatggaaagcaattccggcaagcaaaataaatgaagctgctgctaaactgctggccgaaaatacaaaggcacttgagaaaatcccgaatgtagagaaattcatcaaatagtacttacagaaggtatgaaaaacacttaacccatagaaacatagatttatatattcaatacgtaaaggaaacttatttccttcacataggatttcctaactaattgaaacaaaacacaccattccaattagaaaatctatgtttccaggtgtttaataataatcaaaaaaaaatctgctaaatctgcgtgaaaaacacttaacccatagaaacatagatttgtatgctaaactcctaacccaattattttgaattgcaatataccgttcaaataatagttttttctttacaaaaaatcatttttttatagtaaattagacctcctttataaatcaagtcacttataaaatttgtgtataaattcattttaaactaaaataaaaatgattgactccaaaatacccgaaggtccactagccgataaatggaataattacaaagcaaaagcaaggcttgtaaatccagccaacagaaaaaaactgaacgttattgttgttggaaccggacttgcaggtgcatcctgcgcagcgtctctggctgaacagggttatactattcaatcgttttgttttcaggattctgcccgacgtgcccactctgtggcggcacaaggaggagttaacgctgcaaaaaactacaaaaacgatggcgatagtactttcagaatgttttatgataccatcaaaggtggtgatttcagatcccgggaagccaatgtatatcgtttggctgaatgttccgcacatttgatcgaccatgccgtggcgcagggcgttccttttgccagagaatatgccggatatttaaacaatagatcttttggaggtgtccaggtttcgagaaccttctacgcacgcggacaaaccggccagcagcttttattaggtgcttatcagggattgttgcgtcaggtatccttaggaaaagtaaccatgcacacccgtcatgaaatgctggaattagtaattattgacggaaaagcaaaaggtattatagcccgaaatctcgaaacaggagctttagaacgtcatgttgccgatgcagttgtactggcttcgggaggctacggaaaagtatattatctttctacactggctatgggctgcaacagttctgccatctggcgagcacataaaaaaggcgcttatatggccggagtaagctggattcagttccaccctacctcgcttccgcaacacggagccaaccaatctaaactcactttaatgtcagaatctttgcggaacgatggtcgaatttgggttccgaaaaaagccgaggacgcacgaaatcccaataccattcccgaagaagaacgtgattattatctcgaacgccgttatccctcttttggaaatctggcaccacgtgatatttcatcgcgtgcagctaaggaacggattgatgccggacatggtgtcggaccaatgaaaaacgctatttatctcgactttgcagatgctataaaagcacaggggaaaaatactattgaagccaaatacagtaatctgtttgccatgtatgaaaaaattaccggtatcaacgcttacaaagaacctatgcttatttctcccgctgcccactttactatgggtggactttgggtcgattatgaattaatgaccagtattcccgggctatttgctttgggggaagccaattttgccgatcatggcgctaatagactcggagcgaattctttgcttcaggcttgcgtagacggctattttattgctccgtatacgattccgaattatttggctggagaattaaacgctccaaaagcaaccatcgaccaccctgcttttgaagaagctgaaaaatccgtgcgaacacagctcgatcgttttttaaatagcaaaggcacactttcaaccgatcactttcataaaaaaattggacgattactttatgaaaaatgtggtctttcgagaagcaaagaaaaactggaagaagccatcgaagatataaaagccctgaaagcttcttttgaaaaagatttactgattaccggagatgataccttaaacagtgaactcgaaaaagccggaagaattgccgattacatagagctggccgaattaatgtgtcacgatgctttacaaagagaagaatcttgtggagctcactttcgcgaagaataccaaactgccgatggtgaagccgttcgaaatgataatgatttctgctatgtttcagcatgggaatggaaaggaaaagctaccccccctcaattgcacaaagaacctcttgtatttgaatcggttgaacttgcagtaagaagttacaaataatcaaaagttgaagaaatatgaaactatctcttaaaatatggcggcaatctgacacttcatctaaaggaaaaatgaccgattatgaaatagatgcggtttcagaacatatgtcttttctggaaatgctcgatcttttgaatgaatccttaattcagaaaaaagaacgggttattgaatttgatcacgattgtcgggaaggaatttgcgggcaatgcggtgtgatgattaacggaagagctcatggtcctctaaaaaataccaccacttgccagctccacatgagaagttttaaagatggagatactatttatattgaaccttttcgggcaaaagcttttcctgtactcagagacttaaaaatcgatcgttcagcttttgacactatcattgcctccggtggttttatcggagcttcaacaggtcaggcacccgaggccaatagtattcccatatcctatgaaactgccgaagcgtcttttgatgcggcagcctgtattgggtgtggtgcctgcgtagccacttgtaaaaatgccagtgcagccttatttacgggggcaaaaatcacccatttggctttgctgccacagggacaaatcgaagcttcaaaaagagtgctgagcatggtaagccagatggatgccgagggttttggaaactgctcagacaccagggcctgtgaaattgaatgtccacaaggtatttcgattctttctattgccaaaatgaatgccgaatataccaaagctttaatttttaaaaaataatacatcaatcatttaataaaatacacatagaaacatagacttatcaaactcagaaatatcatttcataagttgaaaatacaagcaacaaaccatgcggaagaaatgtatttcattttgaaacctttttgccccattatttctatgcttctatgtgtttattaaaatgataaccaattgtttaaaatcaaattgacctataaaacaaacccgacaggttttaaaaacctgtcgggtttatagtaaagtatcataccgcaaaataaggcgttaaaatatcttcaaaattatacagtcctttgggtttgttttctaaattttcggcaacaaaaaccactccgtttccaaatgcttccctcgagatcgattcgtgaattaaacgaaccgtctgataagggaatccaaatataacctcgtgcttacctactattcctcctgcccttaccgagttgatattgtctttatcaatttctaaagcttcggcaattttaacggctgttcctgaagttccttctttctttttaaaatgttcttcgtttacttcaatatccacccagggagcaattttctttaaaaatttagcagcaaaaagcaaataattgaccccaagcgtaatattgggtgaccaaaagaccgtagttttatgtgccagtttctttaggaactgcaactctttgtctttgtagtgagaaatagccgagataatcttgacctttcgctgcgctgcctgctctccgtatgtatagatgccatcattcgaagaaaaatctataataacatcaacaggatgtttgtccagtaattcttccattgaagttttagaactcgaataaatgaccccttgttcttctgacggaatgcccaaaaactctgaaacagatctcttttccagaacagtactttttcttaaaacccattccagacaaaatttattattctccagtaatacagttgccactgactttcccgtttttccaaatccaattaaacctattttcataatttacttttttatggagcagaacgcccgtttataaaattgacattttgtagagttcatgtcaaatcaagaattgagttatcaacgatgccgatcactatcgtcttccagtaaaaataggaaatctataatgggattaccggcaataacttagataactactaataaacaacgatgttaacacgaataatattgtcaaaataatttctaaagtacgacaatggtatttttggcactgccctttttaattttattttatgccaaaaactctcctccaaaacggcctgaaatacaactgcatcttatgaaaactcaaaaaatctactaacaaaaaacaaccctttattaatccagtcctaataaaataataatcgattctgacacatttttaaataagatatctatatttgcaacaacgttgcgttagtttataagctattaagtcctttaaaaatgggcattttccattaagaatgaaaaagaaaaatgtattaattcctctttttatgtctgtaactgtattgtttgcaatgctgtttcagatgctgcattcttacgagcatgtttacaagcagctaacaagtaaacattgcgagcatacctctattgacgggcaaaagcaaatcacgcacagtcatacagtagacaacaattgtcagatttgtcattttacgtttagcacttttatatcaagtacttttcaaacgtactcttttcttaaagcaaccgttgaaacttacagcgtgttcttttacgaaaaaacaatttctgtcgttttcaaaggcagtctttttgcacttagggcacccccatttattcgctagtttactgcattctcgtccgaaaaattaaaaaatagcttttgcttgtctttttttcaaagatcaggcaaaacgcattgataatcttattgggtctgttttcaataaaacagctccaatcaggatacgaaagatcattttggtttatccaatttgcctaactcttcggttgtcccagtaaattctacccttcctgtttcgtcactggttaacatgtttcagccctaaaggctgtcactataactgtgattgaaaagaaaaacccgtactaaaaatcatccaaatacatcaaaactatgcttatagctgaaaatctaacaaaaaaatatggcgaccatattgctctaaacaaactcaacttaaccattaaagaaggggaaatttttgctttactggggcaaaatggtgccggaaaaaccaccacaatcaatctttttctaggttttatagctccaacagacggagaactaaaaattaacgacctatccgtcatcgacaacgcacaggaaacgaaaaaatacgttgcttatatccccgaaaccgtcatgctgtatcctaatcttaccggtctggaaaacttaaaattcttttcatcgctggcaggatttaaatattcacagggagaactgacttatttcctgtctaaagcggggcttcagattaaggcgcaccatcaaaatttaggtggttattctaagggaatgcgtcaaaaagttggaattgccattgcgattgccaaaaaagccaaagtgctcttactggatgaacctacaagcggcttagaccctaaagcttccaacgagttttcccaaatactaaaagaactttctgctgatggaaccgctattttaatggcgacgcatgatattttccgagcgcgggaagtggcctctcatattggcattatgagacagggaaaccttgttactgttatcgaagccgataaaatctcggcaaatgaactggaagatttgtatttacaaactgtataaaggggaattactttctcaatcctatccaaaaaaaatgaaacaccatattctctcactgtttttattaagcattacttcgtttgcccaatcgcaaaccgttaataaaaagatatctgatagtattcctaaagattctgtcagggtaaaaaccgaacacacccaattgcaaactgtcgaaatcattggccgttcgaccaaaaaatacaatagcgattattcttttgcagccaccaaaacagccgctctcaacaaagacatcccgcaatccatatctacgatcaccaaagaattaattgcagacaaaggggctatctatctggccgatgctgtaaaaatggccagtggggtgatcccggcaagttattacaatcaatataccattcgcggaatcagtcaaaatgaagaaggccagatcataaatggtatgcgaacacatcaacattactttttacagcccttaacaaccaatattgaaagagttgaagtgatcaaagggccttcgagtgctacattttcctcagtagatccgggtggaagtatcaatatggtgactaaaaaacctttggccgttgaccgaaaagaaataagtctgactgcaggaagctttagcactttgcgcggaaccttagattttacaggcccattgaacgaatccaaaacacttttgtatcgtgtaaacggtgcctatcaggaagccaaatcgttcagggatctggtacgtaacaaatcgtttttgatttctccttctttcagctacattccgaatgaaaaaacagccatcaatacagaacttattttaagcaacatgactggagttctggatcgtggacagcctatttttggcgctgtagcgggagttaccagcttacacaaaactccaattggtttgaacttaggagctccaagcgattttttcaaatcaaaagaaatgattttgatgacgaatttcgctcataaattcagttcaaaagtcggttttaacgcttcatacatgaaacaaacctggacagaagaccttcaggagcaccgaactacaaatgcttttgcagtcgacatgaacaataaaccggttagcagtctggccatgatgcagtttgtacagcgtcagcaatattggaacattgataacctgagcgcttatttcaattttgatttaaaaaccggaaaactgaagcataaagtattagcaggttacgatttgagcagctggaacaaaaccaaaggcggcggacaaaatgcggccagaggttatgtattgaaagacggaacggtagccccttcatttgttgctgcaaactctaccaattatcaaaccataaccgttgacggagtggtgttacctaaaccaaatgtcaattattttaacctgaacaatccaacctatactttaacaagtcctgatgattataccctaaatgtccgtaccgcattaccccctgcactaaccactactaatgcaatctacattcaggatcaggtacaatgggaaagatttaccattttattgggtttgcgtcaagaatggtttagagacattacgaactacaaatccaacaatgaactaaccgtgaaaaagtcagccttactaccgcgtattggagtgatttatgctgtgaacaatcagattaatgtttatacgacttatttggaaggttaccagccacaatcgaatacagtctctttgatgcctcaaaccggaagtttaccagctggaagtttgtttgatccactgaaaagcaacttgaaagaagttggactaaaagctacttttttcgacaattcggtaagttttaatgctgctgtttatgaaatcaatcagcgtaatattctgatgaatgccaacgaccctgcaaatccggatttgctcgtgacaagaggtgctgagagaagccgtggttttgagtgtgatatagccggttttattacggcagactggcaaataaatgcttcttacagttacattgatgctaaaatcaccaacgatcgcgatccttcgttaattggcgcccaaaaacaaaacacacctaaaaacagtgctaatttatggacgagatacaacttcaattccgattcggctctaaaagatttgggcgttggttttggaatgcaatatcaaagcagcaaagtaccctggtttacaagagcttttaccctgcctgattttacagtttttgatgctgcattgtactataaaccaaacaaaagcaatatgcaaattgctctaaatgcgggcaatttattcaataaaacgtattggctgggtgctcagaattacctgcgcctgtttcccggtgcaccacgtaacttcagtcttactgtaacttataaattttaaacggtatcatgtcattacacaaagaaattttaattgccagacatttaaaaaaggctgtttttaaaaatacagcagtctatatcatcacgatttttatcgggatcctgttgctttacgccgctttttcaggttgggaaaattacagcaaccagaatcagacgagcgaaaaataccaacatgaatcacgcgaagactggctcaataatccggataagaatccgcatcgaatggcgcattacgggaattttgcgtttagaaaaagtacaccactgagcgtttttgaattcgggatggaaccgtttttcggaaatgcgatctttctcgaagcgcacaaacagaacagtgccaatttctcagaagcaggattctccaacagtatgcttcgtttcggagagattagtattgctatggttttacagcttttattacctctgttgatttttttcttaggatttaatgctgtcgcagccgaaagagaaaacgggactttaaaattaattttaagtcagggaatcagttggaaacaactcttaacaggtaaaatagtaggggttgcaagtgcgattctgcttatttttattcctaccattttagttcttgtattcctttggctgctgttacaggattttacgatttcaagcgatgaaaccatcaaaatggtattgtttgttctgtttcattttatttacctgatcttcttttgtgtcattgctgttttggtttctgctgcgagtaaaacttctaaaaaagcactgatttccttaatcggaatctggctggttcttacgattattttacccagaactactcaggcaattggcgcttatctttacgaagctccttccaaaatacagttcaacagtgctatcgaaaaggacattctgaaacaaggtgacagccacaacccaaacgacatacattacaaagccataaaagattccctactacgcgcctacaaagtagattcggtacaaaaactgccttttaattattcgggatttatcatgacggaaggagagaaaatcagttcgcgcatttataacgaacacttagaagagctgctaaaagtttacgatcagcagaacagtttttctaaggccgtttcgttcctgaatccttatatcgccatacgaaacctgtcgatgggtttatccaataccgactatggttcgtatatcgattttcaaaaacaagctgaaatttaccgctatacgatggcgcaaaaaatgaatgctttgcaggttaaatatattagtaataaaaagccgggaccaaacgacaagcctttatccatcagcaaagaacactgggctgatttggaagaatttcattatgagccaaaagaaatcccggctattttaaagtccgaaatcctctctgtagtttctatttttctctggattatcctgctttttgctctcctgcgaattgcagccaaaaaccttaaagccctctaatatgttaacattactttttaaaaatttcattcgatcaaaaggtaccaaaattggattgatgttcctgctgctcatcggattcatcggtattttaattgggcagcagtttcaacaaaagcagcaaaacaatattgcggaagctgcactgtaccaaaaagagcatattgcacgaaatgccgcttttcacaaagacgaaatgggactcctgctctactacatcaaattttctctcatcaataaaacattgcctctgaatcctctggcaattggtcagcgcgatgtaaatccatcgattcaaagcgtcacgattcggggtctggaaggtcagaaatacgactcggaactcaataatccgaacaatcttttatccggaaatatcgattttagctttgtgcttatctatctgtttcctcttttgattatagcattctcgtacaatctggtttcggaagaaaaagaaagcggtacctggaaaattgtgtctgtgcaaagcgaaaatacctttttatacattctgaaattgttttacgtccgaattttaagtctgatcgcgctgttcacctttttacttcttttagccgttttgattctgagaattccttttgactcctcccttcttgccttttacggactgggtgttttgtatcttattttctggtttgcagtctgtttttttatcgtttcccttcaacaaaactctaatttcaatgcggttattttactcacgatctggctgtttctcattattatactgcctgccgtaatcaatacgtatattgtgaataaatatactattccggaagctctggagctgactgtgaaacaacgtaatgcctatcatgaaaaatgggatatggataagaaaatcacaatggataaattttaccagcattatccgcaattcaagcgatatcctctgcctgatacagagtttaactggctttggtattacgccatgcagcaggcgggcgacgacgattcggcaaaacaatctcaggaactgcaatccaagttagaacagcgcaacaaagcgagtcagtttattgctttattcgttcctaccctgcatgcccagcttcaactgaatgaaattgccaaatctgatttaggaaaccagcttttatttttgaaggaaacgaagcgttttcatgagaaaataaggttgtatttttatcctaaaatatttgaaaatgcaccggtggttaaggaaaactggtcgaaatttaaagtagaaaccttcacagatccgtcaaaaactaatggtataaaagcctttttgccattgttgctttttaatttgttattgattggtttgggttggtttaacttcaaaaaacaaaacctatagttgttttaaatttaccatataagcaatacaagtaactactgaaactttgtgaatcacgaatctaaaataaagagcatttttagtttactgatactctttaatttacttctgttgcttatatggtttaaaaaattccgcatattctgactaatattttttcaaatgctctttatttaaattttatttagaactaatttaaataaacttttatatttgcccctttcttggcaaattgttgtagttctttaaatttacaaaattgccttttcaaagtaaattttgtttaatgaaccataataacagtttcgaattaaatctttttgaatctttcaaagaaggagacgaaactgcctttacgtacttctacgacaaatacttccgtcgcattcaatcttttagcattcagttcatttatgacaaagacgaagccgaaaatctggctcaggaagcttttctcaatctttggcaaaacagaaaagatattgaatcactaaacggaattccctcctacctgtatacgtacgccaaatcaaaatgtctcaacatgatccgacacaataaagtgaaggataaatttaaaaacgaccttctgaaccaaaaggaaagagaactggatgtcgaaatcttaaattcggtacagtttgatactttagaattaaccgaattagaacgtttaattcaggaatcaataagtgacttacctccaaaaaccagagccgtttttataaaaaaacgtttcgagaataaaaaaaatgtcgaaatagccgaagaaatgcaagtgactttaaaagctgttgaagcccacatgaccaaggctttgaagattttgaagaccaaattatccgattatttgtttctgatttttatccttatttataataattaagaataaaaggtagggtattttaattctgaagtgtacttactataacgagaagtttaaaaactccaatatgacatcggaactcatttacaaatacctttctaatgaagcctcagaacgagaagttcagactctctttgactggattgatgcctcagaagaaaacaagaagtattttattcaagtaaagaaaacctgggctttagcagctctttccgaaactgtttccaacgattcagcagctgttatttctattcagccaaaaaggaaagcgattcagtacttcaaatatgccgctgtatttttggttttattcggattagggaaactggccttcaattttagccaaccatcgaaaaccgcttcaaaagaaattgttttagaatgggcagatggccgtacagagataatggcaaaggacaaaccaactgttttagtacttgatggtaataaaaacctgattgcaaaaaaatttccaaaccacattatttatttcggaaaagtcgaagaccaaaaagtagtctataatacacttaaagttccatatggaaaaagattcagacttaccctttccgacggaacggttgtcagtttaaattcaggaacaagcttacgttatcccgagcaatttggtacaaacggaaaaagaaatgtgtacttaaccggtgaagctttttttgaagttgccaaagacaaagaacatccgtttattgtaaacgccaaccaagtggatattgaagttctcggaaccaaattcaacataagtgcttatcctgaaactccaacagtaaatagtacattggttgaaggaagcattcagatgtatgaaacagaaaataaacaaaatctggttctgctaaagcctaatcaaatggcaacgtggcaaaacaacaccaaaaaaataacaacaaaagcaattgaccctgccttttacaccgcctggacaaaaggagagcttgcttttaaagataccccattctctacaattgctaaaataattcagcgtacctacgatgtcgaaattatcaatgaaaattctgatttggccaaacagaatttcaccggtacgattaaaattagcgaatccagtgtcgaaaacattttagagcttctaaaacgtgacactccttttaattattctattaaacaaaatacgattaccattaccaatcttcgataacgaaacaaatatgacttttacgatacccaatttaaggaaaattttatttttcctcgcccttatcatatcctgttttaaaggtttttcccagaaaaaactcataacattacagctaaaaaacaaacctatcagtttgattattaaatcaatcgaagagcaaagtgattttaggattatttataatgcccgaaaaattgatacggatcaactggctgacattacagtacaaaatgccactttagaaacgactttaacgcagttattttccggaaaaaacatttcgttttacatccaaaataagcaggttttattgacgagtgccgctcctcctgttaattcttcggaaagaaatgcaccagaaacagaaagattcataagtggaaccgtttataattccaaagacaagcaacctcttccgggtgcaacaatccgtataaaaggcaccggcatgggcgctatcaccgattttaacggaaaatttgtttatgaattaaaaggaaacaatatcaatgataaggtgcttgaagctggttttttaggaatggaaacccaatcgcaaaaagtcgaagacaaaaaacagtttgttttttatcttcaggaaactaccgatgaattaaatccggtcgtaatcacttcatcttacggaactactaaactaaaagaagaaattgttggaagtatttctactttaaatgctaaagatatagcagtagaacaagcttctgagagtttcgataaaatgattacaggtcaggttgccggtgtattggtcgaaaacacttccggtgttggaggcccggtcaaaattaacattcgcggacagggaaccttatcttctttaaccggagcaataaccggaacttcttcacagcccttaattattgtcgatggtgttgtgatgagtgaagaatttgcgattgacagtaatgattttgatggaagcggtgatactgttgaacgtttagccaatccgttaatgaaaattgctcctgaaaatatcgaaacgatttcggtcttaaaagatgccgccgctgtaggtatttatggtgctgacggggcaaatggtgttattttgattacaactaaaaaaggaaaaaaaggaaaaacacaatttggtttctctaatcagcttggaatttcatctgccatcaaccgaataaaatatctaaacggtgagcaatttaccgagcttagaaatgagtttcaaaaaaatactaccacaaattatactcctgttgcttacaatggtatcaataccgattggtttgagattttaaaccgatccggaatatacaataagtacaattttaatgtttcgggttcaacttcaaagttttcatatcgcacgaacattagttatttaaagatcgaagaacctcaaaggggtaacgataccaaacaattaaatgcaggaatcaatttaggctacaattcaggtaaatggagtgctaatctgatgttaaaccctagttacgtgcaaataaacgctcccaatatttttgccagttttgcttacctgcctacccttgcggcttataatccggacggttcctatgctgatttaggggtaaacggtatcaccagaggaaatccgcttgctgcgatagaacaaaataaaaatcaagcagaaacatttgggcttttgggaagtttaaatttatcttatgaactaagcaaagccgtaaaattttctaccctttttggaattgattatacagataaagagcaggatcgttatttttctgctgcaaacgaaagtggtcagcttggagggacctttacacttgacgaagttttatatccggcatggggacgacgtcttctaaatcagcgaaattcgaccaaatggaactggcaaggacaagttttattcaacaaacaatggaatgaaaatcatgaaatcgatggtgttgcaggttttgaattgtcagaggataaagcagattttaattataaatcaggtgcaggatttgttaaccctaatccaattaataaaatttcagaggccaataatcagacttacagaagtgaaatcagttacaattccagagtttcattcttatctcaggtcaattataacttcaaaaaacgctactacattctagccaatttaagacgtgacgaaagttctgtttttggcgatgatacaaacgttgctttaaacggaggtgcaggattaagctggattgccagtaacgaaaatttcttacagtccaattcatggattgatttcctgaagtttaaagtgagttatggctcaacaggaaactcaagaattggttcgtacagagctaaaggtttgtacaatattggtcaaaacaattataacggttacagcggagccactaccggtgatgcgccaaacggtcacttgagctgggaaaaaaacacgaagtttaatgttggatttgactttaatatttttaaaagagttgaactgactcttgaatattactatgaccataaaagtgatttaattacaacgagggagatcccaacagagacaggatataattctgtacaattaaatgcttcagacatgtacaataaaggttttgaacttactacaagaattaaatggataaaaagcgaaccttttaaatggactaccacattcaatattgctaccgtagacagtaaagtaacttcattaaaaggtttaggaagtgattatgcagtaggaaatattgcattggctcaaaaagtaggttacagtacaaccactttatggggcgtaaaatgggtgggtgttgatcccgcaacaggacgtgatcttgtcgaaaaaagcggacaagtatacgatgttaaaacttacaatgaaggtcatacggttgcagactgggtacccattggggacaaacaggcggatgcctacggtggtttttacaacaattttaccttttataataatctgtctttatctgttaggggagattttcaacttggaggcgatgttttcatttctgatgtgtatatcgataaatattctaatacttttaatcgaaatctgtctgtaaacgctgtagatcactggagaaatccgggtgatattgtttcgcagcctgccgtgactactgctcctgtcattccaaacttaagcaaatatgtttatgatggaacttatgtgagaatcagcaatatcaatctaagttacaaagtaccgctaaaaaatagttttctggatacgctttctgtttttgcagatgcttctaatgtagcgtattggtacaaagcaaaaagtccgaaaggaatgaacggaatacgagagtacagttttatctatccacaggcaagaacaatctctcttggagttaacgcaaaattttaatgatatgaactattcaaaatacatcacattattctttctgatcttctccttacaaagttgcagtgactttttggaacaagagcccggaacaaaaacttctattgatgagcttttgcaaaacaaacaaggagtactaacagcattaacaggactttatactgaacttgaagccaatgttagaggcgaacgttttgctatttatgctgatttgcagggaggaaatataaaatttacaccaacagcttccggtactaataaaggacaaatcgtaccggccggaaatcttgcacagctatattcttttgatgatttggcacagaccagtaatttccaaagcttttatgacggaagttacgatataatcaatcaggccaacttgattttagaatatactcctgctctaaaagatgctaccgaagaagaaaaaaaacaaattatggccgaggctatgaccataagagcttatgcccattttctggtagcaattgtttacagtcaggattacaaatttactgctgacgcttcgcatttgggaatcgtttacaacaccaaatcaatcaaaaggggaatacaataccctgccagagaaactgctgcaacgacatacgatttaatcatagctgatctaaaggaggcaatccccaattattcgaatttggttcttaaaggtcctgaatactcttattttagtcgttacagtgcaaaagccttattggcccgagtttatctgcagaaaaatgattggacaaatgcctacgaaaccgcaaatgatgtcattacaaattcgggagtaaaattagttccaaaagaaaactaccttacggaatgggcaaaaaccgatcttcctgtatctgaaattttattagagttttcgattccaaaagattctgaaggtactgtcggagcctctatggcaagttatttcggatatacttcagcaactaatttcggtaaatatgtggcttcaaatgatattgctaacctttatgaaaacagcgatttaagaaaacaattattcttaacacaacctctttcaactttagtaaacggcgtacttagtccggtgaattacaacttcactaaaaaattccaaaataatgccggttatgtagctttcagacttagtgaaatgtacctcattcgtgcagaagcagctttagaaaccagcaaatcggatattgctatggctgatatcaatacgataagagctcgtgcaaatactactttattaaccagcacagtcaatctgaaagagaatatcctgttagaaagaagaaaagagctttgttttgaaggacatttatttttcgaccttatacgcaatcacaaaaatatttccagaaatgacggctgtatttcaaccagctgtggtatgacctacccttcttcaaagtttgtattaccgattccgacattcaacactaatgctaaccctaatttaaaacaaaatgaatcgtattaagatattaagcgtattgtgtatagcagtattatttgcttcctgctcaaaagacgactataaattaggcgctgaaattgatccgtttatcagattcaactttctggtaaaaagtgataatacccctgtcgaatatccaattgctaacggaagtttgattcctcagtctacctataccaatacttcgataaaaacactgaaaataccagttgctttaacgacgcgccatttaaataataccgtaactgcaaattttagtgctgtatcttccaccggtaacaacgaaaactttaccgtaaacccagtgaatcaattaacttttcaaggtgctaaactgaccgatacgattagagtttcttttgttaaaagatgggccgcaaaccaaagcattaccttaaaactagaaaccgtatcagatcctgaaattcatatcggaaatctaaattcgacttaccccaatgatacttttaagattgatttggctcccattacgaccaattatacttttccggtaaatcaatacatcattaaaggtgtcattggagagactgtcgattttaaagtaaattttccaaatggttttttccctgaagaaattgaaaaagtatccttttttaagtttcaaaatggtttcgaataccaattgactcatgatgattatggcgataacagaagctcaatcaattatcatttgacactattagaagacctacagaatgatgatgttcgatatgaatcgaaaattaccctggtaaacacccctaactacaatgctacgggagcccttaacctgacgattgtaaaaccaacaaaatcgccccgagaccttcagaccaatccggcatcaaaattttcagatccaacaaatgctttttatcttacctatggcgaacattggttcaacaacaacggtacttgcagctggcaggcttttaatgcactaacttttcccgttgtcgtaacaaaagataatgaaaatgcgattctttacagcgacaaaggaactgcaaatccaaatgatgacgtgtatcatgatgccttcaaaatcggatttaatgtggccagcggaaccaatacggtaaactcttttggattaaaaagatggttttcgaacgaaaataacactgccgcagtttctcccggatttaatattacttctgctttggaattttttccggcaaacggaaacagtaaaaccaacggaacagttctggtaattccgcaagaaattgttatcgggtctgccgttacgggttcaaacaaacccaatatacatgttattgccatttccggtgaaggaacttacaaagaaatcagcaacggattgtatgaaatttcatttgaactaaagcttacaaacgacaaactgtttggaggaaccgtttcgacgcaataccgaatgtataacaacagagtatatccaaaaccagcggctttaagcatcccctgccctaaagaagttactttgtaattgtgaattatgaatggttaatgcccttgagctttgtcaaagcttttagtatccaaaaagagtttcaaatttcaggttctacagcaactttgaacctgaaacctgaaacttggaacctgaaacttggaacctgaaactgaaacaaaataaaacaaaacaaaaaacaaaagaattgaaaaaactactcttcccgctcctgttcctactgagtctgacggcttataaaacagctgaagatcctgattatatagacattcaggaattacgaaaactatattccagcggaaatccttcttcctggcctgcagcggaattggataaaagtatcgacaaaaccacctttcaggatattggagttctttctgcagttccgtatcctgagtacaatccgtactccaaagaaaaagaaagtctgggtaagatattgttttttgatcccagattgtcaacgagtggacaaattgcgtgcgcttcctgccataatcctgaattaggctggacagacaatttgacacgttcctttggtcacgatcgccaaacaggaaaacgcaactccatgacgattttaaactcggcgtatgccaaaactttattctgggacggacgcgcttccagtttggaagatcaggcgcagttcccgattgctgaccctctcgaaatgaacgaaaaactgaccatagccgttgataaaattgctaaaattaaaggctataatgaacttttcaccgccgcatttggcgataaaaaggtatcacttcaacgtattcagtatgccattgcaacgttcgaacgatcgatcaacagccctaaaagcaaatttgatcagtttgtaagtggaaaatcagatgcctataccgattctcaggtaaaaggactgcatttgttccgaaccaaagcgcaatgtatcaattgtcataatacatcttattttagcgacaatcagtttcataatgacggacagactttatttggaactaaaaatgaagattttggacgttataatgtgaccaaagatgtaaaagacatcggtaaattcagaacgccaacgcttcgtgaagtggtcaatactaaaccctggatgcatcatggacattttccttctttattggatgttgtagaattatacaatttaggaaacccctcgcctgttcagaaaaaatatttaggaacagcccgcgattcattgattcccaaatcggacccgttactaaaaaaattaaatctcaataaagaagaaattacagatctcctggcttttatcgaaaccctaagcactccaacaagaagacctataattccaacattacccaaataaaaaaatggtttgctaaattgcccccaagattttcaaacctgtaaagcctgttttctttatgaaaatgggctttttttaatctaatacaatgattaaattgtactaataagcaactttctccgtgataactcgtattttgaatacctataaatttaaatatttatcttaaaaaaaatggtacatataaatttatatcgtaatattgcaatattatattttactcatatgggagcctctaaaacggaacattttaccgacaaacaaaatcagatcgccactatagccaaagcactgggacatccggccagaattgctataattgaatatctgttaaaagtaaacgaatgtatttgcggagatatcgtaaatgagttacctctggcacagcctaccgtttcacaacacctgaaagagctaaaaaatgcaggacttatcaagggaaacattgaaggaaacgccatctgttactgcatcaacgaagaaacttttgatgttctaaagacctatttttctggtattattaccgttacaaaaaatcaaaagtgctgttaaaggctttttttaaatcactatatcgcaatattgcattataactatagaaaaaataaaaatgaaactatcagacattaaaaaaatactccctactctcgaaaacgtagcatttcaattggaaaacggaacttttgttcctgaacactttcacgttaccgaagtgggaatgatcactaaagattttatggattgcggaggcgtaatccgtcacgaaaaaagtatcaactttcagctttggaatgcagacgattatgaacatcgactaaaacccggcaaacttttacacatcattaaactctcagaagaaaaactaaatattgaagacctggatatcgaagttgaatatcaaaatgaaactatcggaaggtatgatttagagtttaatggcaatcattttgtattgaaaagtaaagttacagcctgtctggcacaagatgcctgtggaattccgtcaccatccggctttatcgaattaaataaggacaaaacaaactcctgttctccaaactcgggctgctgctaaactatgagcattttctttcttaaatatagaaaaccaattataatcactacagctgttattgtactgcaactgatttatggctttgagcccaaattttgcatcatcaatatcatttggttactcgtttaaaactatgacaaaaaatattctggtgctctgtacaggaaatagctgccgaagccagatcgccgaaggttatttacgccacttcctgggcaacaaagcccacgtttacagcgccggtattgaaacgcacggggtaaatccaagagccattgcgactatgaaagaagatggaatcgatatttccggacacacttctaatcacattgacgagtatcaaaacattgttttcgatgttgtacttacggtctgtgatcatgctaaagagcaatgccctttctttccttcaaacgcattaaagttacatcacaattttccggacccggctaaggcagcaggatctgaagaagagattatacaggaattctgtaccgtgagacaaatgatcaaagcatattgcagtgcattcgcaaaaacaatcaacacagattattaaatacaaatctatgtgtttaaaaaaataccactaccctacttttcatcaaaatttgttattcctctattgaagtataaaatgatgcgacgataagaatgcagcgatccttttttaaatttgtttgaaacgaaaagaagcttctgcctctttgtaaatctaccgcatcatgaaattaaaacaccttcagattcaaaccaacaatattcaggaaacagcaacattctaccaagacgtacttcatctttcaattctggaaaaaaaatccaattcggttacgattcaggtaggtgaatcggttttacagtttatcgaaaatcttcaattcaactctatctatcattttgcttttaatattcctcaaaacaagctgcaagaggctattcagtgggtcacaaacaaagtggatttaattgttattgaagatgctactgttatcgccaattttgagaactggaatgccaatgctgtatacttttatgacaacaatggtaatatactggaattcatcgtccgatatgacctcaacaatgctcaaacggaaccctttagttctctatccatactcaacatcagtgaaatcggaattgtcaatgagaatcctttggtcctcgctaaccaactcataacccagcacggtttagagttctttagcaaaaacgacaatagcgagctcttcgctgccgttggagatgatgaaggcttgctgattatggtacgccccaatcgaaactggtatcctactcaaataccttctacaagcaatacaaccgaaatttacatagaaaataagggaactcagattgaattgaagttttaaagaattaatttaaattccgatttataacttctaaatcaaaaagtttctttcagtatagtactgactacaataagaaaaaccttctcaaaacaaattttgggaaggttttcttgcttttcaatgtttaaaaaaaatacggcctgagaaattaaatttattggctgtagttttattgtattgccaaatattacgcgtttagctcctttattacatgagaataccagttatttaattagtgagttgtcaattattttatctgtataatttttatcaaaatttaatggaatgtggaaagacgtaaaaaacttacaaaacagaatattagatttggtgtcagaatacaaaaaccaaaagactaaaccagaatgacttatgaaaaagaacagattaattttattcttgctgttatttgccagtatgggtacaaaagcccagactttcagcgacgacaacttcatatacacacttacccctaagaaaccggtgcgggcagcaaacttaaattcgctcaccaaagacgagatgagtcaaaacgtgacctattttgatgggctggggcgtccgatacaaaccattgccattggtcagggagcagcaggacaagatattataacccctatggaatatgacggctttggccgacaagccatagaatacctgccctatccggctgccaatggaagcagcagttatcccagaattgacactaatacggccatagctgccgcaaaaggcatttatagcgctgcaaaatacgacaatactgcaaatcctttctctcagaaggcatttgaaccatcaccgttgaatcgcgttgtaaaacaagctgccccgggagcttcgtgggaaatgggcaaaggccatgaaattaaaatcgattaccaggctaataccgctgctgataccgtaaaactgtataaagccaataccacttgggacgcagatttagggttgtacgaaatttgaattaatactatttaattaatgacattctaactacttgtttttacatgtacctgcgctggatggtacgccaggataccaaaggtgttgacttaggtatttggaaaaccatttcaccttcattattgtcgtgtccgctcgatgtacattccggtaatgtagcccgtaaattagggatactaacccgaaaacaaaatgatggaaaggccttaacagaactcgatcttaaactccgaaaaatggaccctcaagatccggtaaaatatgactttgctcttttcggattgggcgtttttgagggattttaatccccagggagtgacctttcattagttttattgcgttttttttcgtaatttcactctataaagcaatatttatggagcattttataggttatataaaacactacgccatcccattatttgtatttacaagtttagctttagcacttgcattaatactcaaaagaattcattatcaatacactcttccttaccggcatcacattgtacgaaagtccgaaattttccttacagaaatcacactctcaaaaccggaggaaagcattctgaaatacaaaattgccaaattcagatctgaaattcccatccataaaacctggtgtaaagaaatgcttatcgacgatatgattcggatgaaaagcaatttaaaaggtaaaaccgccaaaaacattcttattatatacaaacaactgggtttaaaccattattcagcaagtttacttcgggattttagaaaatataaaaaatgtgatggcatttatcattttcaagccttgggatataaacccggaattgctctaatcaaaaaatatttgtttcatcccaataaaattatccggtcaaacgccaatattgcttacctgattttaaccaaaggagactggcaggccgttaataaaattccggtaaaagtatccatcagtaccaccataaaaataatggatgtattgcattcgcaaaacataccaattccacctgatatcgaactttggatagaatctgataatcctactactctgaaattagccgtaatgactatggttttttacaattacagaaacagatcacaggatattatcaaattgctcaaacacgaaaataaaaaccttagaaccgatgtgattattgccattcgcgacttgtacctgtatgaggccgaagaggatttattactgcaatttaagcaagagagtatcgaacttcaattggaaattctgaatgcccttgccattgtaggctcagaaaaaacaatctcatttttaaaccatcaaattccgagagaagaaatcaaagatcttaaattaaaaatggtagctgctttaaacggtctcgattctgtatgtatagatgtattgggaagacaggattccgatacgcaaaaaatgattaatcacattagagaattacaactatgataactgattttctacattatattattcactgttacaatctctttgtgatccatttttcaatcgggtatattctgttctacatcttcctgtctgtcctttcttactgggcgatcgtaaaacatttaaaatatcaaaaatacctggaagaagaggttttaattcgttcgaaccatatactgggcgtttccattgtggctcccgcttttaatgagggggtaaatatcgtttacaatgttaaatccctactctctcttacctatccgaaatacgaaatcattattgtcaatgatggaagttctgacgatacactggaaaaactaattgtcgaatttgatctggttaaaattgacttttattatcaggagaaaatagctacgcagcccgttcgggggcattataaatcaaagaatcctgtttattcgaaattactgattgtcgacaaaataaacggaaaaagcaaagctgatgccgcaaatgccgggataaactcgtcgcaatatcccctttttttatgcactgatgtagattgtattttaaaaagagatactattttgaaactggccaaaccctttatggaaaatgaaactcgtgtcattgcttgtggagccggaatcaggatttcaaactcctgcgatatcaaggaaggctttttgtttaaagttcattatcctaaagaatggtatccgcgttttcaggaattagaatacgtacgctcttttttatttggaagaatggcatggagtcagctaaacggtctgcttttggtttccggaggtctcggtatgtttgataaagacattgtgattaaagcgggtggatactggcatcagtccttaggtgaagatatggaactggtgacgcgcatgcgaaaatacatgcacgatactaaagaaaaatacttaatcaaatacattcccgaatcactctgttggacagaagttcccagtacgcgaaaaatattcttaagacaacgtattcgatgggctcgtggactggttcaaaccttgtatttacatcgaaaaatgtttttaaatccaaaatacggacgaacagcctttctggtattacctttctttttcagttttgagtttttagttcctattatagaattttttggtatactgactctaattttcagttttatatttggaatgatcgactaccagtatttactgattataagcttattagtctatctattctatctctccataaccataatatccatattgatagatgaaatactatataaaagttatgccaattataaagaattaatggttcttatcgggatggccgcacttgagccgtttgtgtaccatccgataacgatttacgcctcactgaaaggctattggttcttctttcgaagaaaagaacaaaactggggtgtaatggtccgtaaaggatatgaaagtccaactaaaaaataagctgatcatgaaacataacagaactatagctctaataagactgcttttttgtttatttctattgacttgccaaactacaaaaggtcaaagaaaaatagacactgacagccttttgactgttgtgcttcatgacatgaaaaatgcccgtccggactacaaagcaaatattcagagagctcagttaggaaaaaaactggctccggactacctggatttctatttggtattggggcgaaattatgacctgacaaaagcaaaagacagtgcccgattttactataactatgtcattgataaaaacccggcctatgaggatgcctatctctatctgatcaacatgaatttagaggcgaaaaattacgatgaagctctggtcttaaccaataaagcaattgaccagtttcccgacaacaaaaccttcaggctaaaaagaattgcaatttattctctgcagaatgacactaaaaatgaagaaaaaaatctcaaatcgataagaacaaaataccccaatgatgccgacatcgaacagcgtctttttgccttgtactccagaactaatatggatcgggcgggtgtttattacaacttcaccacaattgatcgcgacggtgttggcccgtggcatctggcaagtgccgattatacgcatcaacgtacctggggaagtttaattggaagagttagccatgctgaaagacgatcttccagtcaggtcatggccagcggacttcaatttgaagtcgaatcttacctctcgggaaagaagaacaactattcctatattgatgtcgcctacagcagtgacatcgcttttcctgaatggagattagggtattcctatttctacaatttcgccaaaggctgggaggcagatttaggcttccgctacatcgaaatgcaggacaacagcaatttaaaaactttaaatgtaggattaggaaaatacttcggggcatactgggtcaatttaagatcttacattcaaaaagacgcaccgtcctttacccttacctcccgctactattacggaactaagtttgattatcttaccctaattgcaggttatggaacttcaccggacgatcagaccagagcagcggaatatgaaaacagagcttctttaagttcgtacagactgagtgccggcttttataaattaatcagaacccattatatttttggaatattaatcaccaacaaccaacaggaatacacccctaaaaagtttcaaaacgaacttgattttgcttttttactgcaatataaattttaaatcgtatgaaaaaaaagcgtcttcaatatttgcaaatatttattctcaccctgcttagttttaagatgatggcacaatctgaaattacaatatccgataaaaccaaaattattgctaccgctgaaagtactcaggctgcggcaggaatactaaaattatatctggagaaatccgtgtcgaaaccatttgaaattactacaaaaagtcaaaaagagagtgatgcttccgaaatcatactggaaatttccaatgataaaaaactcaaagcaaatgaattcaatgtcaaaagcgattcaaaatcaatttatataacggctccaaatcagaaatacctgcgctatgccgtttatactttactcgaaatctgggaatttaggaaatttaccgcaacagaaacttatataccaaaagtaactcagtttacttttgcaaaaaacacaagtaaaatctatcagccctcttttgattacagagctttgtttttccctgattgttatgacgaagatttcagggactggcacaaactcgactggcacattgacgattttggtctttggggacattcttttagcatgcttgttccgccaaaagaatattttaaaactaatcctaaactttttgctttgtacgaaggagaacgaaatacagaatctttgtgcatgaccaatgacactgttgtgaatctggtagaggaaaaaatgactgaaattatcgcaaaaacaccccatgcgcaattctattctgtcagccagaatgatgatgtcgtgtattgcgaatgtacgcaatgcaaagccatgaacactaaatatggtggtccgcaaggttcgttttattattttctgaataaaatcgccgctcactttcctaaaaccaaaattacaaccctagcctatcttcataccttcaaacctcctgtaaatctgaaaatagctccaaacatttatacgatcttatgccctattgaactggatcgcggcaaacccattaccaatcagaacaatccatcatttgtcaaaaaccttgagaactggagcacaactttaccacaactatttttatgggattacaccgttcaattctctaatttcatgtctccctttcctaactttgaatcttttcaaaacaactataaactctttcaaaaaaacaaagtaaagggattatttgtacagggatatgctgatgttccgggagatctttcggaattgcgacaatatctcctggcaaaattaatgtggaatactgatattgacattaaagctgttactgctgatttcctcagaggtttttatggaaaagcagcgccctatgtcgcaaaatatcttgacctcatagaagccaatcaaagcaaaagtaaagcttatttagatatttattctggtcctgtacagacgcgaaatacgttcttgacgcctgaagctatggatcaatacgatcattttctggaacaggccaataataccgtcgaaaatgattccattttaagctcacgcgttcataaattacgactggctttagaatttgtatattttgagcaggccaaattttatggaaaaaaccaacacggaatgtttgttgtaaataaccaaggcaaaaaagaagtaaaaccgggtttaactgaaagagttctaaaattctcaaaatcctgcaatcagtttggagtttatgaattgagcgaagacggaatttctcctgataattattataaagaatggattgaaattggcaaaaacaccactactcatttaggcgaggacctgaaagttacctttataatacctccatctgatgagtttaaaggcaaaggaaggtatggtttggttgatggaaacagagggtacaaaaactttaatatcaactggattggatggtatgatgcgaatccggaaattgaaatcgaaaccaaaaatcttgatttcaacatcgtaaaattaaatttcctaaacgatcagagacattggatttttacaccaaaaaaaataaaaatctatggttttaagaatcagaaatgggaacttattaaagagcaaatttgcaacaatttaacagaagactacgaaattacaacacaatcatgggaagtcgaaaatcaaagattcagtagttttaccaagatcaaaatcgtagtagaaaaccagaaggaattgcccgtctggagaaagcgaaaaaacaaaaaagcaatgataatgctggacgaaatagagttgtataaaaaataatagtcgaaatggatactaccgataaaaaaattatgatcatcgataatgatgatatgactgttgagattttaaaattcattctaaaaaaagaaggcttcaaagtaagtatcgcaaaagatggtatcaatgccatggagcggcttcctgttattatgccggatttggtgattaccacgattaccgtacctcttaaatccggtctggaaattatcaatgaaatcaagcaaaattacaatgatatccgtgttattgcactttcttcactgggagaagaagaaaacactgttgaagaagcttttgaattgggtgtagacgattttattgctaaaccctttaatccaaatgaacttttactgcgaataaaacgatttttatagctttttaaactgcatttttaagaaattcgaagcccacaaactgtcgtaatttctaagaaacaacgattttcagctatttatagctatatttgcacaaaatttaatgcaaatgagcactttcgaaaaattcaatctcccaaaatcagtacaaaaagccatcgacgaactaggttttgttactcctaccccaattcaggaaaaatctttttcagtgattatgtctggccgtgacatgatgggaattgcacaaaccggtaccggtaaaacatttgcttacttattaccccttctaaaattatacaaattcaccaataccaatacgcctaaaattgtaattctggttccaacccgtgaattagtcgttcaggtagtagaagaagtagagaaactaaccaaatacatgtcggttaaaacactggggatttttggtggagtaaacatcaatacacagaaaaaagcagtgtatgaaggtgtagacattttagttggaacacctggtagaacaatggatttagcattggatgccgtagtacgttttgatgaaactcagaaattagttattgatgagtttgatgaaatgctaaatttaggtttccgtacgcaattgactgctcttttggcgatgatgaaaaccaaacgtcaaaacattctattctcagcaaccatgaccgatgaagttgatgctgtactgaatgacttttttgactttccggaagaggtaacacttgccgcttcgggaacacctttggaaaaaattacacagattacttataatgttccgaatttcaataccaaagtaaatttgctaaaacatttactggaaaccaatgaaagcatggaacgtgttttggtttttgtgaacaataaaaagatttcggatatgcttcatacccgaatcgaagaggattttgaaggtcagtttggagtaatacactctaataaatctcaaaattaccgtttgagtactatggcagaatttcaggaaggtaatcttcgcggattaatcaccaccgatattatggccagaggtttagacatttcgaacatctcccacgttattaactttgaacttcctgaattccctgaactgtacatgcacagaattggtcgtacaggacgtgcagatgctaccgggactgctattagttttatcacgccacgtgaagaagaattcaaaattgaagtcgaagtattgatgaatcaggaactggaaattgcccatttccctgaagaagttgaaatttcaaccaaattaatcgaacctgaaaaagacaagcagcctattaagtttttaatgaaaaaaccaaaactcgagggtgacggtgcgtttcacgaaaaatcgaaaaagaacaaaaaagtcaatcttggaggtccgtcgaaaaccaaaaagaaaacccacggatctgtcaatcgaaacatgctgaaaacgagagataagaaaagaaaggataaggataaatagatactaaggttctgaggttctgaggttctaagatactaaggattaaacaaaaagcttaaaatattgaattaagaataacttagttctctattttgagcttttttattgttcgaaactcatagtcttagctgcttagcaccttagaaccttagactctcaaaaaattatatcctcgtaaaaaccaaccccaccggagagcacaacccgattctcttgcctgtatcggttaattttccagttgttttatctcttttaaaaataataatatcattcgtatattgatgtcctactaaaagaaaattacccgtgggatcaatcgcaaaatctcttgggccttttcccagagtactcacctgctccaccaattcaatcccaccatttttctgaatcttataaacggaaacagcattcgcatcgacacgatctgaaacatacaaaaatgctccgtcaggtgaaattttgatggctgccgctccggttcctcctgtaaatccttttggcaaaatactggtctcgccaataactttcagacttccgtttgggtcaaaactaaaagtcgtcagtgtaccgtctaattcctgaaccagatacacaaatttaccgtctttactaaaagtcaaatgccttggtccgcttcccggttttacatctgcagacccttttagcgttaagatttcgtttttagaattcggattgtatttatacacaaaaactttatccagacctaagtcattagacaaaacaaattttttatcaggtgaaaaggccaccatatgtacgtgtgctttctcctgacgtgctgcattaattccttttcctgcatgctgaactaactgctgtgcttcagaaatacttccatcggcattcttcttaaaaacggcaatatttcctcctgaataattcgcgacaagcacatttttatcatcattaatcaaatgacaaggatcggcacccaacgcatcatttttatttagaaaagttaattttccagatcctgcgtcataaccaaaagcactaacagcactgtgagtcccgttttcatttacggcatacacaaacttattgtctgctgaaaccgacaaataacttgggcttactacattttctgaggaacttttcaatttgaaatcaccggaatcggcattaaaatcataaacataaattccgttactctgacaggtattcgtgtaagttcctaccagtaaattaaatttgttctgagcctgtaaacctgcgcaggacaaagcagaaaaaagcagtatgtataatcttttcataatccttgaattgttttagatacgctaaaatagcgaataatatcttctctaatcctatttttttgttacaaatggaatcccaaaagttacatttttcaaacgatgcaaatcgtttcttcaacaaaaaaggatctaaattcatcaaaaaaaatagctaacggcgtttactcataatctgctttataactgataaggtttgagtaaaaatttgtatttttgaccagtgtcttcgcgaaaaataaaacgtagtgaagtaaatcgaagcccgaatgcattttaaacatcccgaaattctatactttctgttcttgttaattgttccaattctggttcacttatttcaattacgacgttttaaaacctctttttttactaatgtccgtttcctaaaagaaatttctgtccagacacgcaagagttcgaaaatcaaaaaacgattgttattagccacccgcttactgttgttgacttgtattattctggcttttgcccagcctttttttgaggctaaagacagtaaaaatgctgccaatgaaatgtatatcgttctcgataattcgtttagcatgcaggcgaaaggaaaaaaaggagaactgctaaaacgtgctgtacaggaacttctcgaaaacacgcctgaaacttcctctttttcgctgttgactaacactgaaaactattggaataccgacattaaatcatcaaaaagtgcactacaaaacctaaaatacagcgctacaccttttgaacttccatcgataatagcaaagatcaaagcgcacaaatcagctcataaaaaagatattgtcattattaccgatgcggtaggtcttgccgaaaaggacataaaaaaccttgacaccgaagagaaaccttattttattattccggaagcggaacagaaaaacaatattgccattgacagtgtttttatcaatcagactctggagaatttctatgagataagcgttaatctgtctgcttacggcgaagatttcaaacccgtttcaatggccttgtacaatcaaaataaactgattgccaaaaccattatccattttgatgcaaagaaaaagaaaatagactttaccattccaaaagaagcttttcatggttatgttgttattgaagacaatggattgacgtacgacaacaagctttatttcagtatcctgaaaacaaagaaaacaaacatcatcagtattggtgaacccgaaaaaagtaatttcttatcccgaatttatacatcggcagaattcaactacaacaactattcgatcggcaacctggattacaacagtttagacaaacaaaacaccattattctaaacgaactgacagaagttcctcaggcattacaaactaccttaaaagcatttgtcgctaaaggtggtaatttagtggtgatcccttccgaaaaaacatccctttctaatttgaattctttcttgggtaattttggaaaaattcagtttaccactcttgaaaacaaagcgaagttaatcaccaaaatcaattttgatcatccactattctccggtgtgtttgagaacaaaatcacgaactttcaatatccaaaaacaaacagttcttttggtatttcaagtccatacccagccgttttatcctacgaggaccaaagcgtatttgtaacagccattcaaaatccggtttcgggaattactgtctttacggcacctattaatgccacaaattcaaactttcagcaatctcctttgattgtccctttattttataaaatggggcagaacaatcaaaaaaccggggttaacgctttgattataggcagtaatcagccttattttgtagatgtattattaacaaaagacgccattttggaagtaaaaggaaatgatgattcctttattcccattcagcaaatactaaataacaaagttaaactcacctttaatgatttccctgaaacggcaggaaattatagtgtttttgaccgaaaagaatggatcgaaaacctaagtttcaattacaaaagaagcgaaagtgacctgagtcaggtaaacaccaatgtggtttctgattttaaaacagcggatactatttcaaccatttttaacaccttacaaacggaacgaacagacagccaaatttggaaatggtttgttatctttgcactgttatttttagcattagaaatagcaataataaaatttgtaaagtagtttttttttttagcttgtttgtcatttcgacgtaaggagaaatcacactcgctgagaacgcactgcacggaatattgaaatgtgatttctccttacgtcgaaatgacaaacgagaatctgaaaaataataaataaatttctctacatatgaaaataatcatcagaagcgccaaaataatcgattcagagagtccgtttcacaaccagaccgttgatcttttaattgcagatggtttaattgaaaaaataggaacttcacttcctgaaattgataatgcaaaagaggtaaaatttgatcatttacatctttctcaaggttggtttgacagtagcgtttcttttggagagccgggctacgaagacagagaaacaatcaccaacggattgaatgttgccgcaaaaagtggttttacagccgttgctcttcaacccaactccttccctattattgacaaccaatcacaggtaaattttgtaaaaaataaggcaaacggttttgctactgaacttttgccaattggagctttaactaaagccagcgaaggaaaagatatggcagagctttacgatatgaaaaatgccggagccgttgcttttggagactacaacaaaagtatcgacaacgctaatcttctaaaaattgctttacaatatgtacaggattttgatggattagtaattacttatgcacaagatcctaatttaaaaggaaacggtgttgcaaatgaaggaatcgtttcaacaagattaggacttaaaggaatccctgctttggcagaagaactacaagttgcaagaaacttatttctactagaatataccggtggaaagttacacatcccgaccgtctctactgcaaaaactgtcgcattgattcaagaggccaaagcaaaaggcttgaaagttacttgcagtgttgctgtacatcatctggtactaaccgatgaaaaactggaagaatttgacacccgttttaaagtaactccaccactacgaagcgaaacagacagaaaagctcttttaaacgcagttttagacggaactattgatatgattacttccgatcataatccaattgatattgaattcaaaaaaatggaattcgacactgccaaaaatggaacaattggtctggaaagtgcttttggtgctttattaacagttctgcctttagaaaccataattgaaaaattaacgttgggtaaaacggttttcggaattgaaaaaagtatcatagcggaaggctcaaaagcgaacttcactttctttactccggaaggaaaatcaacttttaccaaagaaaacattctctccaaatctaaaaactctgcttttttaggagcagaaatcaaaggagctgtgtacggaatattcaatcaaaatcaacttgttacctctaaataattacaatgaacaattcaattgaaaaaggaaaaccaatcgctatcaccagttatattttgattattggggtactaatcgcaatgtctatgaactcagaagacaaaaacagctttgcttcttttcacattcgccaggcattaggattgtctttaacctttatttcattcggagccatcatcagcaattttgacagcttctttattactttcccaatgtggatctgtatttcgattttatggacttacggcatttttaccgccattcagggacaaacaaaaccaattccgctagtgggagcgcttttccaaaaatggtttcaaaaaatagggtaaattttaaattacaattaaaaaaaattccaaattttaaattccaataaccctggttttaagattttaatcgcatttttttatcaagcctaaagcttgtcaggctgagcgaagtcgaagcttgtcaagctgagcgaagattaaagcttgtccggctgagcgaagtcgaagcccccccagctttatcttaatacatcttacatttcacatcttatatttcacaattcacatcacatcttacaactaaaaaaaatgaatctatctctagaatataaaatacaaaaaccaaaagttatcttagacaaaaatcctgttttaattttattacacggatacggcagcaacgaagccgatttattctcatttgcaaccgaactccctgataactattatattatttcagccagagcaccttatgatctacaatatggtgcttatgcctggtatgcgattaactttgatgcagatcagaataaattttctgacaacgaacaggcaaaaacttcccgtgatgtaattgcaggctttattgatgaattaacgactaactaccctattgatgctaataatgtaactttgattggtttcagtcaggggtccattctgagttattccgttgcactttcatatcctgaaaaagtacagcgtgtagtggctatgagtggttattttaatgaagatatcatcaaagaaggttatgataaaaatgactttaaaaacctaaaattctttgcctcacacggaactgtcgatcaggtaattccaatcgagtgggccagaaaaacgcctgcaattttagaacatttgaatattccaattacctataaagaatacccggttggacatggcgtagctcctcagaatttctttgatttaaacaattggctgttgatataattaactttttcaattacagcaccgaatcttaaatctttttccattaaaaaaaaaacaatataattcttacaataagaatcaatttgcaaaaaaacatttgcatttttagagtctagattttataatttaaatcatcaaaaacaaaaaataagcaaaagtttcctttcatggaaacttttgcttatttttgtaaatggaaaaatgaaatggaaaaactttttgaagttcagtttcttgaagatgcttatttatttttaaaaaacatggaaccaaaacattctgaaaagattatttacaatatacataaagcacaaatcaaaaacgatccggagcttcttaaaaaactaacagatgatatttgggaactccgaacactctatcaaggaaatcaatatcgattgctcgctttttgggataaaaccaatataaaaagcaccttagtaatagcaacacatggttttataaaaaaacaaagtaaagttgcttccaaagaaatactaaaagcaaaaaaaatacaattgaattattttaaagagaaagattaatctactttatacagtaatgaaaacatatacattagaagtcgtaacagatgaattagttggaaaaataggcacaccaaacagagacaagttcgaatataacttgcaacttgatttaattgccaatgctatcagacaaacccgaaaagaacgcaatctgactcaggaagatttgggcaagctcataggggttcaaaaagcgcaaatttcaaaattagaaaataacactggaaatgtaacgatagaaacgctaattaaaattttcacagccttaaaagctaaagttacatttgaaataacactgtaacattagtaattggctaacaaaaagtagtctttcgagatgaaattcaatctcaatcctcaaaaatgatcaaaatttaaaaaactaatcttatgagtttaaaaaaattagacaacccggcgctacttttaattgatattcagaaaggatttaatgatattgcttactggggaggagaacgaaataatctagctgctgaacaaagtgctgctgaacttttagaaatctggagaaacaaaaaaatgcccattttccatgtacagcattgttcttctaatccaaactctattctgaatgaaacccatccgggaaatgaatttcaggatattgtaaaaccacaagaaggcgaaacaatcatcaggaagaatgtcaatagcgcttttatcggaactaatttaaaggaattacttgacgatgctaaaatcaaaactgttgttatcgctggtttaacaacagatcactgcgtttctacaaccactagaatggcgggaaactttggctataacgtttacctcatttctgatgctaccgcaactttcaataaaaaaggtatcaacggagaggaattctctgccgaaatcattcaccaaaccgctcttgccagtttaaatgaagaatttgcacaggtagtaactactgaatttatcaaaaggattgtctagttttcagtctcagtattcagtcttactttaaaactgagactgaatactgagactgaatactgagactgagactgaatactgagactgcgactgaacactaaactattctcccgtataaataattttcccgtctttctttaaaacataacctttccagggaattaactgcagatcacctttaatccaaggctttccttctgattttctctctaaaagaattggttctttttgagtgtccagaaaaagttccgcttggtttccgtcaaagataacataagctacggtagaatacgttttcccatcttcggcatgagctagttttgtaccgacttcaaaaagacgaacacattctttcttaagagccgaccaggtgtaacccgcagaaggtttacatccatgagcatctgaatctcctccaacaacagctggtttaacttcttctttcttttcagaagttttattttcttcagcaactttcttcccgcaagaaaatgaaagtcccgcaacaatagcaagtaaaaacacctttttcataagtcgaatatttagttaaacccgtttagaaataagaaaagagcttcttacttttgatacagccaggtttggtttacttcaaaagtaatactttcgtcgtcattaacaaagtacttcaacaacacttcaccccacatttcaccattgctgtaatctgcaataatccatctgtgatttaaaattttcaccttattgatgataaatttgttcggaccaattttgtcttgtcctgtataaggattcccatttggatttgcatttaagtccaataatttctctgttaccagtgggattagtttttcatataaaataacttttcctcctgttgcactattatcaaaataattctgtgcattttcattgtgttctaaagaaaaataatctgcttccgccaattttgttgataccaaattgatactgtctctcagctttttggtcgtttttacatatctgtcctgctcaaatttcacttcgctgctgtaaaacatataggtaaaaacattcattaatatcgcaaggataaaaaggtaaagcattaaggattttttcatttttgtaatataattaaattgtaatttctaaattatcataagccagaaaaacattttcgggcaattgtttttgcacttcttcatgaaagcctaaaacgtgactaatatgcgttaaataagcaacttcaggtttcactaaatcgataaaatccaatgcttcctgtagattaaagtgagtatcatgcggttctagacgcaaagcatttacaaccagtacctttaaatttttaagtttttcaacctctgctgtatcaatcgttttaacatccgtcaagtaagcgaagtcatcgatgcgatatccaaaaacctgcaagtcaccgtgcattacattaattggaattgctgttttatcgccaatggtaaaaggcacgtcattcactacctcaatcgttttaacgctgggtgctcctgggtacttgtttactgtttcaaaaacataatcgaaacgacgttttaaattgtcgattacacgctgatgcgcatacacaggaatctcgccctgtctgaaattatagggacgaatatcatctaaaccggccgtatgatcagcatgttcgtgtgtaaataagatagcatcgagttttcggcagccacaggaaagcatctgttgcctgaaatcaggaccacaatcgatcacatacgagtgatcgtcccatgtaatccaaatggaaacacgaagtcttttatccttagcatcagtgcttttacaaacaggatgatccactccgattatcggaatgccttgagaagtaccagtacctaaaaaatataccttcaattgaacttaatttttttacaaaaataggattatttctctttcattagaaggctaatttactaactttgtaacaaatctatttaaaataaaatgggtacagaaataaaactcaaaggtgacagggtcatcgaacagattccttctataaaagacaaagcattacgcattaatttaaacgagaatatttacgggacatttgctgaaataggcgccggacaagaaacggtaaggcattttttcagatccggaggttcatcgggaacaattgcaaaagcgatgtctgcctatgacaaagattttagtgatgccgtttatggagctgaaaacgatggacgttatgtaactgaggaacggttaaaaaaaatgcttacccatgaagggcaaatcatcgaagaacgattaagcagagaaaaacatccaacaaagcttttctttagttatgccaacactgttgctaccatagatttcgctaaacaatttaaaggtcatggctgggtaggaatccgctatcaaattgaaccggatgaagcatacaacgaaattattctacacattcgttttaaagaaactgatgccagactacaacaggaaacacttggaattttaggagttaacctaatttatggtgctttttacaaatacaacgatccaaaacgattacttcgttatttatacgatcacttagacaaagaccaactggaaatcgacaccattaacttctcagggcctcgttttgctcatgttgacaatcgtttaatgagtttgcagctggttaaaaacggaatgactgatgccgtaatgttcaatccggaaggtaaaaacatattaccagcagctattttatacaaaaaaaatcttcttgctttaagaggaagtttccgtccggttacaaaagtaaacatggacatgtatgagaagtcgcttaagatgtttttggaagaaaacaaagtagaaaaagacaatacactggttattttcgaaattacactttctaacttacgttctgatggcgaaattgacgagcgtgactttatggacagagccgaattactttgctctctggggcaaactgtaatgatttcaaatttccaggagtattataaagtagtagaatattttgctaattacaccaaagcccgtatgggactagccatgggagttaacaatttagtcgatatttttgacgagaaatactaccgtcatttaagtggtggaatcttagaagcctttggaaaactattctacagagatatgaaagttttcttatatccaatgttggatgaaaatggcgttttaatgaactcaaacaacttaaaagtacacccaagaatgaaagaattgtataaattctttaaattcaacggaaaagtaattgatatcgcagattatgatccgcataacttagaagttttctctcgtgaggtactaaaaatgatcaatcagggaaaaacaggatgggaacatatgcttccaaccggtattgccgaaatcatcaaagaacaccatcttttcggataccatccgcagaaagaactggagcagaatacctaaaaaaaagtccccaacaagaaattttctttttggggactttttttagtttgcagtcgcagtttacagtcgcagttattacactgtatactaaaacttgaaaagtgagactgagactgagactgaaaactgagactcttttttacttcaaaatctgtgcagtgtgttctttcgttttcactttttcgattacctcgtcaataattccgttttcgtctattacaaaagtggttctgtggattccgtcatactctttccccataaacttcttaggcccccaaaccccaaacgcattaattacagatttatcttcgtctgccaataacggaaaaggaaactcgtacttatctttaaattttaactgtgctttctgactgtcagcactaacacccaggagttcgtaattattcgctttaaaacgctcaaaattatctcttaaatcacaagcctcagctgtacatccgggagtacttgcctttggataaaagaaaacgaccaatttctttccgacgtaatctgccagtttatgtgttttcccatcctgatctactcctgagaaatttggtgctttatcgcctttttgtaatgttaccatttatttagattattagattgttggacttcttagattattcgattattcgattattagactattcgattgttcgattgcaacttaaaaataattcattccccacaatcaaccattcacctatcacattttacaatgtacattttacaattcacaattaaaataatactatttttacgggattaaatttacggaaatgaataaagaagctcgagtaacatttgttataaatacgttaaaagaactctaccccactatacctgtaccattagaccataaagacccttacaccttattaattgcagttttactttcggcacaatgcactgatgttcgtgtaaaccaaattacccctatacttttcgcaaaagcagataatccgtatgacatgattaaaatgtcggttgaagaaattaaagaaatcattcgcccttgcggtttatctccaatgaaatctaaaggaattcatggattatcacatattttgattgacaaacacaatggtgaagttccacaagattttgaagctttggaagctttgccggcagttggacataaaacagcaagtgtagtgatgtcacaggcttttggtgttcctgcctttccagttgacacacacatccaccgattaatgtaccgatggaatctttcaaacggaaaaaatgtagtacagacggaaaaagatgctaaaagattatttcctaaagaattatggaatgacctgcacctacagattatctggtatggacgtgaatattccccagcaagaggatgggatttagaaaaagatattattacccgaactgttggtaaaaaatcgatattagaagaagctgctaaaaagaaagtttagcagcttccctattatttttacatgcttcctttaagagcattgtattcttttgtcatattcaacgatctgtaaatacctaagagcgattttacagcattttcatttttaggctcaatcaccagtgcttttttaagatacggaatggcactttttaccacttcgtctttctgagcatctaatttatcaaattgtttcatttcattggcactggtccccaatgatgacatctgatcctgaatttcttttctaaactgcactttaacataagccagatttaagcaacaggttaaacaatcctgattgatttttaatccatcttcataatatttctccgcattgcgaaaatcatttctctcaagataagaaaagcctaaagaaaccagaatctcttctttcttagaaggcggattaaaatttcttggtttttcatataaaccttcattaatactagattctcttgcactcatcgaaataaatacttcttcctgttttgtttttttatttgtagcataaaaaaccatcccttttccggaatagtttatttttttcagctcctcaaaatactttatggcagcgttataatccttacctgccaaagaagaagaggccgcattaaacaagtttaaagtatcttttttatcaaacaaatatacttcgtaactcttatcggcactttccttaaattttccaattttataatcattataagcaccatcaaccaatttaaacttcatttctttcaacgcagaactcgctttaaaagcatacttataatttcgggattcgttttcatacaataacacatcctgataggctgctgatgccaatgcaaaattacttgcagcatcgacattttttgttgcgagatccttataaacattaccttttgtaaaaaaataatccgtctttacctcgtccggtgcatttaatatttgatattctattttttttaaaacggctaatgcttcctggtttttccctttagcataataagattgtgcctcttttaattcttctttttgagcaaacactccaatacttatcattaggaataatgatactatttttagattctttttcattttcggtttggtttagttgtttaatagattttagggtaatccaatgagacactatcaaaaacatccaaacgaaggcagtaaagattaatactacatccgcttagacacctgacaacaactcatcattcttgctattctttacaaaataccagcagaaacaacaaacgaaacaaagtgtgggtagtttttcttcatcaattttttggtttttggttagacttataaaagaatcctcttaaatgaacttttctatatattgaaagttttttaatacacaaatcatctatatagagcaaattcattgaataaaaatccgctttttaactataataaagctaaatataaaataaataaatgaaattcaaacaaaacacagaaatttaacaaaatacccgaccaaaatctgaaggcttctttttacatcaatcaaaagacacaagccaaaatacaaagctttacaacctgaatatctgacccttactgtaagttaggttttgtaaaaaattactgatttcaaactcaaaagaattcctcccattctttgccacggaccaactgaacaaaaaaaaaactcactacctgcctttacatgcaaatagtgagcttttaaccagaacgaccatctggttttttctttcgaaacaaacatccgacaaatgtagtgggctgtttaattagctataatttcaaaactcttatcttcaattttcacaactttcaaggcttgtgaataactaagtaaaaaagaaataacttctttttttggttttaaatctttagaagctaatgcctttttagagtaaattttcgccataccatcaaaacgttttatactagtataacgaagcaatacctaaattagtattaattggttaaaataatttgatgtttatcaattatttttctcaaattcatcaaagcataccgcattcttcctaatgctgtattgatactcacatctgtaagctctgaaatttccttaaaactcatatcctgatacatacgcatcaccaacacctctttctgatcttccggcaactcttcgatgattctttttaaatcaacctcgacctgatcaaaaatcattttattctcaatagtcaaagaatcatcagacatgacagagaatatcgaaaactcttctgtttctctgtacattggcatttttttggttttacgaaagtgatccacaatcagattatgggaaatacgcatcacccaaggcagaaatttaccttcttcattataggaaccactttttaaggttttgattaactcaatgaaagtgtcttgaaaaatatcatttgaaatatctctatccgcaatctttgaatatataaatccatatatcttagactcgtgccttttaattaatgttgcaagggcattttcgttgccttcaacataattttttaccaatagagcgtcaggaatatgcacatcagccataatactacttttttagtttctatttaaaatttggagtaattttataaaaagtagttttattttataggcgtggcttttgggttatggactagtgttaatattttgatcaaatttaacaaattaatattttaaaaagcaaacaaaaaggcgaataattaacaataaattgttaattattgcaggacacacttcgtttttgttctatctcaggcaaaaacacccctaatccaatactcttttaactcaaataacaacacctaaaaacctaacaaacaagtaattacatatatttcacatgttttttttttattaatttagaaagaaaattctatcgctaattttttctcaaattgcctttattatttctctcacatcgatctgatcagttttgaattctaaatcttttgattttgtacatctgaattctgttagaatttggaacaatctgattgacaaaattgcaatcaaaattgattacttttgtagaaattgactttttttatgcaaattgatctttcgacactcgacccaaaacataatattatcattaaaggcgcacaggtacataatttaaaaaatgtagatgtagcaataccccgaaataaactagttgttattacaggcctttcaggatcaggtaagtcgagtcttgcattcgataccttgtatgccgaagggcagcgtcgttatgtcgaaagcttatcttcgtatgcgcgtcagtttttggggcgtctggacaagccaaaagtagaatacattaaaggtattgcgcctgccattgcaattgagcaaaaggttaacaccaccaatgcgcgttctactgtggggacttcaacagagatttacgattatatgaaattgctttatgcccgaattggtcgtacctattcacctgtttcaggtcaggaagtaaagaaaaatacggtaacagatgtgattgccgatgtaaaaactttagaattggacagtaaatggctcctccttgcccctattcatcttgaagaaggcagacaattggaagacaaactgaaagtactgcttcagcaaggttttgctcgtattttagttcataatgaaatggttcgtctggatgattttacatcttcagacattcatcagttagacaataaagatatactgctcattattgaccgaattgtggttaaagaggaagaagaattctacaatcgcctcgccgatgcagtacagaccgctttttttgaaggaaaaggcatttgttttttacaagaactgaactccgataaaaaattctcttactcgaataattttgagcttgacggaattacttttttagagcctaacgttcatttattcagtttcaacaacccctacggagcctgtccggtttgtgaaggctacggaaatattattggcatcgatgctgatttggtgattccaaatacttctctgtccgttttcgaaagcgccatttacccctggagaggtgaaagtatgagctggtacaaagacgaactggtcaaacatgcttataaatttgattttcctattcacaaacctttcttcgaactttcagaagaacagaaagatctaatctggaaaggaaaccaatattttcaaggtctaaatgatttttttaaagaacttgaagagaaaaactataaaatccaaaaccgcgtaatgttgtcccgctaccgtggaaaaacaaaatgccatgcctgccgtggcaaacgcctgcgcgaagaagcatcttatgtaaaaataaacggtaaaacagtctcagatttagtcgatttgcccatcaaacatttagtaacttttttcaagaacattgatctaaatgtttacgaacagcaaattgcaaaacgattaatggtcgaaatcaacaatcgtttgtcttttttaactgaagttggtttagattacctgactttaaatcgaaattcggcaacactttcaggcggtgagtcgcaacgtatcaatcttgctacttctttgggaagcagcctagttggatcaatgtacattctggatgaacccagtattggtctgcacccaaaagattctgaaaggttaattaaagttctattgtcacttcgtgatctgggcaatacggtaatcgtagttgagcacgacgaagatattatgaaagccgccgatatgattattgatattggtcccgaagcgggtacatttggtggaaaactggtcgctcagggtacatataaagaaatcttgaaatcagattcactaaccgcccaatatctgaacggtgatttagaaatttctgttccgaaaagaagacgtaaattcaaaaaccatattgacattgtaggagcaagagagaacaacttaaagaatattaatgtcacttttccattagacgttttaacggtcattaccggagtttccggaagcggaaaaagtacattgattaaaaagatactgttcccggccatgcagaaaaaactggacagtgctgcggaaaaagcaggtcagtttagtgaactaaaaggttcgttttcgcaaatcaaacatatcgaatatgtcgatcagaacccaattggaagaagttcaagatccaatccggtaacttatatcaaagcctacgatgatattcgggacttgtatgctaaagaaaaactctccaaagtaagaggatatcaggccaaacacttctcttttaacgtcgatggcggccgttgcgaaacttgcaaaggagaaggctcaataaatgtcgagatggtctttatggccgatgtttcactaccgtgtgaaacctgtggaggaaaacgtttcaaaaaagaaattctagagattaatttcgatgaaaaaaacatcaacgatattcttacgatgaccattgatgatgcaattgcttttttcgacaagaataaacaatccaaaattactcagaagttacagcccttgcaggatgtaggcttaggatatgtacagttaggacaatcctcttctactctttcgggcggtgaagcacagcgtattaaactggcttcttttttagtcaaaggagctacaaaagataaagccttatttgtttttgatgagccaacaaccggcttacattttcatgacattaaaaaattaatgacttcctttgatgccttaatcgaaaaaggacattctataattgtcattgaacacaatcttgacctcataaaatgtgccgactggattattgatttgggaccggaaggtggcgaaaatggcggtcatctactagccgcaggaactcccgaagatattgtaaaagtaaaagaatcggttactggagtgtacttgaaagacaaactttaaccttaacaaaaatttcaatataaaaaatccaaacctcaatattacaattgagatttggattttttatttcatatctaagctgttatgccactaaacatttttcttcaaaaggaaaaccatcttcgtcaatggcaactaatattttcttttgcttggtggcttctatagtcagataaagccatgcaaacgaccacaatccgagggtaaggcaaaaaatcgtaaagtttaaactgtgatttactacttttccgcctttactcaaaaccgcgaatagcaattcatcgttcctttcttcgagtataaacccactattaactttacttgatatcatactagaaaatacttgtaagctttgttcttgactgagttggccgttcttcataataattccttaaaaattaatccaaatactactacaattacctcactattataaattcctaaaaaacattctaattaaaataaacactataacatgtacttttattgtcagcttttcataagatatttttaccctataacaaaaagtgttgccatattcttagctaaagttaatttttataaaataaaccacaaaacaaaagactgttaaaatttcaagattacctacagaaattcaaagctttaccctttattcttaacattaaaaggaggtgcttgatagtcattgttcagataatttgcaggaattgtcgtcgcattaccatcgcgaagtgctccgtaatgtggagacataatttctattccggcagcattaaacgaatcctgaatgttttgatgcaaagacgaataaatcctgggctgtttcgtaggttctttagtgtaaacgttgatctgatacgaaacataaaaatcatccagactcgtttgcaaaacaaaaggacttggtgtctgctctaccatttccgtttttagagcagcttcaatcaatgctttataaatgtctttatacggcacatcatacccaatcgtaacggtagtatgaatcaataaaccattattggcatgttttgtattggctgaataattagtcgaagtacttgataaaacagttgcattaggaatcgtaatatcttcaaatttaggtgttctgacacgggttaccaaagccgttttttcaataacctctccgctaacatcaccaatttttataaaatcaccaatcttaaacggacgcatataggtaattaccaaacccgccaccatattagcaatcgcattagaagaacccaaagaaaacaaaacccctacaaataccgaaacacctttaaatattggagaatctgaccctggcaaatacggaaatataaccaccagcatgaaagcaagcatcagaaaacgaatgatgttaaaagtaggcattgcccaatcgctgtaaaaaccatcaattttaatattctccttttttatctcatcaaaaaagaacttgatcactcttatggaatatttaaaaatgacaatgataaccactatagtgactaaacttggcagaaaccccacaaatcccattaccgcaagttttgcaggcgaaagaatccaacgcagcaaagtagttgtataagcttcggtagcaggaaaaatactgaacaataatggtaatgaaagatatactattaaaataagtgttattactttaatagcactatacaatcgcatgagtaaaaactgctgcttttgaggtgagagaatattaatattattatacttgaatcctttaaagtgtcggtcgctattttttaggatgtacagctttaccctgctgaatactttaccaacaaagtacaaaacaaatccaataattaaaaccagtaatgctgtataccccaatctttttggaagcatggagtaattgtcattctgatacagaatcgctcgtttgatcaggtgtaaatttcgctttgcgatgaaatctgctgtttgattctccgcttttgcatctgcatctaaaacagacatgatgacaaaatcattcttataaacaatgtcctgagaaatatctgaaggtacaaccgaaatcgaatcagctataaagaatgaatcctcgtataattttctgatcttttctgcaattgcatttgctctgttttcgggcgaaaaagaacctactttattgtagacataaaaaagtgtgtctttaaacggttttacgggatatccttttgattttacttctttaacagtcgttttcgatgtttgagaactgtccttctgagcaaaagccagagaagaaaacaaagtcataaaaagtgctaaaaaacaaactattttatttttcatatactgtcagcaataagttagttatcttttctaacaaatatagagacaaaacagtttcaaattaaaattacttttactccctttttagaaatctactaaattttaattcctatcttttttaatatagtatcgattactttattgatatcaggagaaatcgcaaatttataatttaaataaacatataaaatggttactaaaattgactttaaagcaatactaaccaattgataaaaagggaattcccaaaagtaaaacaataaaaacaatgcaaatgtaattaacatcgaatatattgtctgaatagtaaaaggatacaaatgaagccttttcaccacaaaaagcagttttgccaaactatataaggtaatggataataaagtagcaaaagcagatccgaaaattccaaaaattggaataaaaatcatgtttaaaattacggtcaacgcaaccagcattaatcctaaatacaacaccatacggtaatatttagtattaaaaatgatcgcattattgtttcctaaaattaaatcaaagtatttagacaagccaatcataaatacaactgcaattccaccactatattcttttggaaccaactcgtataactgaccgatatttacaaatatgcaaagcattacaaagccacccacaatctgtaggttaattgacgtttttttgtaaagttgattcaactcatcatgtttgttatcatgcattaattttgctgtaattggatatacaatctgatgcatagcgcggcttggaaccgaaataaccagtgcaatataggtagcaacagaatagaaagcgatattttctatctgcatatattgatttaatatcattttatccccatccaaaagcaaattagcaacacttccggataaaataatataaaaagtatataccagtatatcttttgtatttgcaggtattgtaaactgaaaagttggcttctgaatactaaatgcatataacatggttatcaggaatgccaaaaaatataaaattgccgtcgcatacacaaaaccttcaacgctaagccaattataataaacacctattaatagaaataatgaaaataatcgcagccccacttcctttacaaaatttccaaaaacggaatgcatatttacccgcaaccaggcataaaaaatctcaaaataggccatgcacaatccaataaaaggtattaaccatatatagcttctaacaatcgcattcttttttgacaaaaaaaacagaatctcatcataaaaaacaagacctatcagtaaaagcgggattattaataacaaaggaaataaaaccgtaaaggatagaaaacgggatttttcttcctcagtttgatattgcgaataaaatttaaccaaagtattttgcatcccaatcgcaaataaaggcataatcacattggcgcaagaagtcacataattagttaagccataaaaggttgcacccaaaaaaaccggatacaaataaagtgtattgatggctccaataccgaaacctatataagtgataattgtattcttgaaagactgatttaaaacaatacccatttttagatttctgattttagattttagattgcagattagcttagttaatcaactgtgctaattgcttggttagattctttctggaatattgttgtaaaccaacaccattggcctgtagtttcccttctaaaaactgattataaaagcccaaaattacactttttaacttcgctttttcagaataatcaaaaaatactcccgtattggtttcttttataatatcggcaaaatcagaaccctgaggtccgatggctattattggtcgattggacaccatatattcgaataacttacccggaattatacttttggtatcttcggaattaatttcgattaaaagcaaaacctgtgatttcttttggtgtgctatcgcttcatgatgcgaaacgtatcctaaaagattcaaataatttttcaaatcaaattcagtgatagcatccaatacttcctgacttactgctccaattaatttgatttctaaatgtgatttaaactcaggaacttcctgaagcagttctacgagacattcccataaaaatcgaggatttcgatcggataaaaaagatccgatatgtgccaacgtaaattttgtatctaatgtttgtttctctacattttcgatgtcataaccattggtaatcactgaaattggcttgttggtaatggcctcaaactctacttttgttgttttacttgtgacaataatggtatcggcactgttgagtactttatgttcgaggtttttatgctttttggcggcataacccgacaaacgcaaagctttatgatatccaattgtagtccatggatcacgaaaatcagcaaaccattttacatttaatttttcttttaattccagacctattaaatgtagactatgtggcggccccgaagtaacaatcgtatcaatatcattctccttgatgtatttctcaagataagccactgacggttttacccaaaaaacacgggcatccggaataaacaaattaccacgaacccaaagaaaagttttgtctaaaaaggtttgtttcttcttatgtggaaaaattcccgaactaattttctttgttttattctttgaaaaaacagaagccagctgatagggctcccaaattctgtttttaaggactactactttatcggaaatctcattaaccagaccttcatcaacaattggataggttgggttttcaggaacataaactatcggctttatgccaaattcgggtaaatactttacaaattttaaccaacgctgtacacctggtcctccagctggtggaaaataataggtaataattaagagttttttttgttccaatttatgctatgctatgaagtaagtttatacaactaaatattttttcctttttcgtcattcaattttccaagctcctcaatatctaaaatatctttcggtctgttagcggcttttttagcaacaattaaattatcatagtcaataaaataaaccggggtttcacctatcattacaactgtagcatcttctaataaagaagtaaaagatttatcctctaagcctttaacagctgtcataatatctaatcgcaaaccaaaatttaatgtaaaatcactccatccaggaataaactgcatagtttcaatggtctcaaaatctccgagattaattgattttagtgctttccttaaattaattcgattttcaacagtatcttctaaataaatatcaatatctccagtattcctattatatccgtagatatttacagcaaagccaccaatagttatatatttaactttgttttcaaaaaaactacgccaaatagctattatttgctcattcattactttttagatcgaattattctagctgtctttatcgtataggaaacttcaataatagccattagtctttccaatctttccagataagaaagcttcttgatttctgctattcttttagcttctaactcttgtggagtaccaaaccttaacacgctatccttcattgtttactttctttctaatacacagcaaagatacaaaaatgatatttcaacaatattttaaaacgattttaagctttcgcctttttcctttcaaaatagagcccgccaatcaaaagcagtaacattccaatgcaacttgccaatgtaattacacttcctgttttaacaacctgtggttcaaatttaaattcgatagtatgttcgccacccggaatttccatagctcttaaaacataatctacagggaaatgatccgtaagtttaccatcaatataggcattccaaccattcttataatagatctcagaaaaaacagccaaaccatcttttccgttatttgatttgtacttaatgtagttaggcttgtactgtactacctgaatggttcctgtagtatcccactgttttttcattcgggcatttctaaatttaccttcatgctcacgaacgttgaaaaccgctaccgttttagtatcgatatgatccaatgctttcattacatcatccggtttatttaccagtttaacagtgcttacaaaccatgcatttccgttagcattcggatttactgttggaaactcttttccttctttatccgtttgtatgatatattttacgtttaacatgtctaaaacttcgacattgttttttgcaatctgatagtcaaaaagctgctgtattcttcttggttttgcggcatgatatccgcctaaagagtggtgaaaataagaagcacgtgcacttgacatgtttccgcttacttcaaaaactctgtaatgagtcgtatcttttaaaatctgagcatcagaaggtgtttcctgaaatggcgcagcaatttgtaccgggctcacaaaatctttggctgatacatattttttatctacaaaaaataaatcaaaaatcattaaaagaccaacgataatcaaggtcgtattctgagccagtttatttttgatgaacaaccaaaggattccaaaagtaatcacgataaaaaagccggatcgcaataaatcagcagaatacaaactctttctgtcttcttttaaagcatctacaaaagcaggcccgtaactttctaagaaataattatcactgctgcccgtaaaatgaaacatgcttttagccaatactaaaatcaaaataacacctaatccgaaaacaccagtctgtaccagggctttctgttgcaatttaggctcttctttagctttgaaaaaggattgtaatcccataacagccaaaacaggaaaacacaattcaagaataacctgaatcgaagacactgctctaaacttatcatacattggaacgtaatcgataaagaagtctgtaagtaacgcgaagtttttcccccaggaaagtattagcgatactaatgctcctgtgaaaaacacatattttatttttcgatcatcaataaataaagctaaaactgctaaaaagaaaaccacaactccaatataagccggagctgccactataggctgatctccccaatacgtcggcattcccgacacaaaatcctgtgcctgttctgacggtactccctgctcaatcataaaggaatacatacggctgtctgttcctacattttcatggtttgaaccaccaaaaagtcttggagcgattaaattaaaactttcagcaattccgtaactgtattctgtaatatattcacgacttagtgcattttcattggtctttttagaaccatcgggattaaaagttaattcgctgttactacgggtactaaatttagcatattcactggttgccaacaaattagtagcattggctccgatagcaaaaattccggctacggacaaaacaccgatagcagttaaaagcgatttatattctttttctttgataaaattaaaagcaaaataagctgaaaggatcaataagaaaatcagtaagtaatacgtcatttgaaagtgattggcattcacttctaatgcaaccgcaaacatggtaagcagacctccccaaatgtactttttttgaaaaacgagtatgaatccggcgataacaagcggcatgtaggcaatagcatgagcttttgcattatgtccaacaccaagaatgataatcaggtaagtagaaaaaccaaaggcaattgccccgataaatgcttttaaaggatcggtttttaaaaccaataagagtccataaaagcctaagaaatataaaaataaataatcggcaggacgaggaagaaaacgtaaagcatcgtctaatttacccacaaaatcattaggataattagctcccagctgataagttggcatacccccaaacgcagaatttgtccaataaggttcagaatgttctgtagctctaaaatcgttttgctctttagccattccggtatattgagcaatatccgattggaaaatttgttttccttgtaaaaccgggtaaaaataaattaaagaaacgaggataaagcccagaataacaagggcatgcggatagaacttatttactattttcaatttaggctggtttgggttaaatgatgaatcctataaattaggtcacaaatttaatctatttcttcgtaatcaacataatcgccaacctttttggtttcacgaggattttttgcattggcggtattgataataatttcatcgttattattacgtgttttttgccatgtattatcctgactatattgttgttgtctttgaaaattctctccagctttttctactgctttttttaccaataccggcaaaaagattcgtgctaaaaatttaaaaatataataaaacgcaacgatccacattatcgttttaatcagatttacaaaagatgcttcttgcatgatcatataattttttttcaaaattaataaatccatcgtttaaaattaaaatatcaatcttaaataaataataaaatatagtacatttgaaatgcgttattactttttaatccaaaaacacgtttatgttaaaaaataaaaactttgttactgcagctctttgtttattacctcaattattttttgcgcagtacactgatgtcatcaattcaaaccgtcctggtgaaacgatgtcagcctatgccgttggaaaatcagttatacaggcagaacttggtgtatatggcatcaaagaaaaacacaatctgctggattatgacgccaatggttttggtacagacctgaccattcgttatggtgcttttttagaaaaactggaacttattgcggacatacagtaccaaatggaaaattttgatacgccctacacaagttataaaaaaaacaatttcagacaaacggttttaggagccaaatatctgatttatgacccctataaaaattacaaaaaagaagccaatatttacagctataaagccaatcgcagctttaactggcacgagttaattcctgccgtttcgttatttgccggtgctaattttgtgggtaaagacaatccttattctttctctccacaatcgagtatttctccaaaagtcatgttaatcactcaaaatctatttggcggtggaaaatgggttttcgtaaccaatattattgccgattatatttcaacagactacccgagctacggctatgtgcttactcttacacgcggatttaatgacaaatggtccggctttatcgaaaatcagggttataaaagtgacttttacagcgatgccattgttcgtggcggagcagcttacctaattaaccctaaccttcaggtggatgcatctgtaagtaccaatttcaaaaatacgccttctatattgtatggaggagttggggtttcctggcgctatgacggacgttataaagaaaatcaactgcaaactaaacgtgaagacagagccaaaaagaataaagacaacaaaatggagcaaagagaaatcgattaccaggcaaaagaacgaaaacgtaaatcgaaatatgaataaccaaaacagtaagaaaaaaattactttatatctttaaataatgtaggaaaataattatatttgaaaaattatacgccaatttttcaaatatgagacattatctgccaatcaactcagatagatcaaagttactatctgccctatttttattacaataccttatttttttttcttcatgtgaaaatgaaaaacatgactcattacacaaaactcaactaacagaaaatgaaatcgaagtaaaagatggaagactttattttcagtctaaagaatcttttacacagtactacaataaatatgttagtttacctgaagaagaattaagtaacttattaacccctttctacaaaaaggggtttctgtcactaaaaccaattgttacagaaaaaaacgaagacaaattatttaacctttacaaggaaaaattaaatttgcaagtcccccgaggtacaacatcaaaaagtacattcgcttattcttccgttgaatcctccataaatgacgatccttttgaatcagtcgacgaactgattggagacgaaacttttgctgcctatttaaatataaatggagaaatacaaataggcgaatcaatatacaaatacactgacgtaggcttgtttattaccgataaaaaagcttacactaccctcaaaaattttctggagtcaaaaaatatttctgaaaatccatttagtaaaactgatctgacagttaaagaaaatttggttccgtcactaccggaggtctttccaacaccaattggaaacaataatcaaattgtttattacagaccagcgaatagtaagttaacagcttcaaaatcaaaacctaattctgctaaaccaggaatctataactcaagtgaccccaactacaattcttttttcaactcactaaacagctgcaatcctgatcatggactatttgccaacttatttggagataacaatgtatgtatcgatcagtatgaaaaaaaaagacgtgtaaaaacaaaagcttttaattacaactatttacttgtatttcatttaggtgtcaaatgtgtacatcagtttaaaggatggactggtttttggcgtgtagaagcaactgacgaaataaagcttctagtagaagcggctcaatttgaatacaatcgagatgcgcttttgggcaacaatatcataaacaaccaaaccaaagaacgggcctatttcatgaataacaaaagagcttttttcacaggacccaataatataaatatctataatgagtggggacaacctctgatatcttatgtcaatctaactagtctgcctaaagtttttcaggacgatttaacctttgagttctttggaacgggattaagcagtttagataatcttattcaaaatggaattgatagtaatttaaacgcgactaaacttaacgaatggttttatggcggactttatactacaacaaaatcacagctacaaactgcatttggaaacactacagtgccaccaacgaacaggacatttgctgcaaaattccctcaaaatggaaatattattgtacaaaaatcggtttcatcgcaaggctatgacattggagtaagagaaaaaacatttgactatggaattagactttgttttaacagtggagatagctccagctggtctatacgaccggagataggatgtgatattctggtaaaaccatctaattttagagttaaaataataggtgccgcacgtaaaggaaatgagtggcatggcagtaaatttaacgttgatattgactgaatatgaagaaagaaataataatcatagtaatcattttactgagcaatttcatttttgggcaagaacaaaagaaaaaattgcaatacatcaacatgtcctccttctctcaggctaaaaacacagaatcctattttaataaatatactaaaaacaactctagagaaagtaatggtggaagccttgagataaatacaattcagggcgtaaagtttttcgaagttttctcaatttcagtcggtattagcgtagattggaacattgataaaactttcttatcgactccattaataatagatcttagaatcttctccagcaaaaataacaaacctggattttttacgtatatccaaacgggtcaaaatataaaatggtcagattcctttgccggaaatggtgtaactgcaaaattaggagccggctacatttttacagaaaataataaagcatcattttatttcgatctcttcaaaaaatcaaaacaaattaaaacttctgaatttcaaaacaatggctactatactctcactggttttggtatctcgttgggaataatatttaaataatcatgacgaaaataaagtacactttactaacactgcttattagctgcatgcctgtagcgtcgcaaaatacaagagtagaaaaagacatttacaacctacaaaccggctttttgggaatatggttcaatcacgaacatcgactactcaatcaaataagtttacgaaccgaaattggttttgacatgggttttcgcggatgctctgactgtactactacatatgcaatagctcctgtaattaatctggagccaaggtggtattacaatatcaataaacggactgctaaaaatcaacaaactaataatagtgccaattttataactctacaaatccactgttatcctaactggtttgttatttcaaatcatgacaatgtctttgtttccaatcaaattgcgctaattcctaaatggggaataagacgaaatattggaaatactaatttcaattatgaagcaggcattggaattgggcgtaaattttatctagatgaaaatttttcggatactactgccgacctccacctccgaatcggctacactttcaaatgacgcatcaaatccattaattcgggctttttttacacaattcttttttgttatttcaaagatagctatattcgtttcttaaatcgtagcacctaatttaaagcaacattcttaacaaagaaaatcttaatgattacaattaaagaagccataaccaaaaaggaattaactgactatatcaaatttccgttttcaatctacaaagacaatgcatactgggttccccctattgtggcagatgaattagagtcatttgacaaaactaaaaaccctgcttttgacaatgccgaagcttatttttatctggcttacagaaacaatgaaatagtagggcgaattacagctatcatcaactggtctgaggtaaatgaccaacataaaagaaaagttcgctttggatggtttgatacaatagacgacatcgaagtcacaaaggccttgctggataaagtttacgaattgggaaaaaaacacaatctggagcacgttgaaggcccgatgggattctcgaatctggacaaagttggtgttcttacagatggttatgatcaaatgggaactatgattacatggtacaaccatccctattatgtgacacattttgagcagttaggttttcaggttgaaaaagagtacctcgaaagcatcttccctttttcaaatgtgaaacctgaatttttccttaaagcacaagaactcatcaaaaaaaggtatggcttacgctcattgacttttaccaaaacaaaagacatcatgcctcatgtcgacaaaatgtttgatttgtttaatgattcatacgccaaattagcttcgtttgtagcgatttcggatgttcagaaagaatacttcaaaaagaaatacatcagctttatcaatccggaatacatcaagtttgtggttgacaaagacgataatttagttgcctttagcattgtaatgcctagcttttctgaagctttacagaaagcaaaaggaaaattattcccgtttggatttattcatttactaagagcccgtaaaaagagtaaagatgttgttttttacctgattggggtacaccccgagtatcaaaacaaaggagttaccgctattatttttgatgaatattacaaaacattttcagaaaaaggaattcaaaactgtatcagaacacctgaattagctgataacacagccattcatttactttggaaaaatttcgacccaaaagtacactgccagagaaaaacgtatttaaaatacttgtaagtagttttcagtatcagtcgcagttaacaattttacccataaaaaaatccattcgttacacgaatggatttttttatataattcctatatcaggaatttatttctttaaagttttacgaaacgtcaacagtggtacgttcagcgatttctttataagttccgtttactaatttctctcgaatggcttcaaaagcagttaaggtttcatcaatatcagctaaggtatgagaagctgttggaatcattctcaacaaaataatcccttttggaattaccggataaaccacaatagaaaggaaaataccataattctctcttaaatcgtttaccattaccatcgcttcaggaatacttccttccaaataaaccggagtaatacaagtattcgtatctccaatattaaatcctttttctcttaaaccgttttgcaacgcgtttacgttctcccaaagtttatctttaatttcagaggaattacgcaacaactccaaacgtttcaatgaaccaatagtttgaatcattggtaatgctttagcaaacatttgtgaacgtaagttatattttaagtaatcaattacagttttatcagccgctacgaaagctcctatattagccatcgattttgcaaaagtagagaagtaaacatcaatttcatcctgaactccctgctcctcacctgctccggctcctgtttttccaagtgtaccaaaaccatgtgcatcatccactaacaaacggaaattgtatttttgtttcatggcaacaatttctttcaattttccttgctgtccacgcattccaaaaacaccttcggtaataaataaaatacctccacccgtttcctgagccatttttgtagcacgctgaagatttttctccatgctttcaagatcgttgtgtttgtaagtaaaacgttttcccatgtgtaaacgaacaccgtcaataatacaagcgtgcgaatctacatcgtatacaataatatcatttttagtaaccaaagcatcaatgattgacaccattccctgatatccgaagtttaataaataagccgattctttcattacaaaagaagccaattcattttctaattgctcatgataagtagtgtgtccggacatcatacgagctcccataggatatgccgctccatattgagctgctgcatcagtatctgccttacgaacttcaggatgattagccaagcctaaataatcatttaaactccagtttagaatattttttccgtgaaatgtcattctaggacccaactctccttctaactttgggaaaacataataaccttctgcctgagaagcccattttcctaatggtcctttattgtcctgaattctttcgaataaatcttttaccataatatattgtgtagtaatatttttattttatacagggtgcaaaaataaatatttattctgtgcaatcataataatttaaaaatgattctgaccaaaattgttctttgataaattttcgccgcaaaaccaccaattaaacactacttttcttaacaaaaaacaatacacctccaaaaaactgcaatttataccggttataaatataaccaaaaagacctcaatcattttatttttattaattttaaagggcatttaaaaaaatgaattacaaatactaaaaccaaaataatggctttaagcacttcaaaagatctaaaactcgctgttcttattgatgccgacaatgtaccttacagcaatgtaaaaggaatgatggtagaaattgcgaagtttgggactcctaccactaaacgcatttatgccgattggacaaaaccaaactcaaacggctggaagggcgttttactggaacacgccattacccccattcagcaatacagctataccgttggaaaaaactcttctgattctgctcttataatcgatgcaatggatttactttactccggaaaactagacggtttttgtattgtttccagcgacagcgattttacacgcctcgccattcgattgagggaatccggtatgaaagtaattggtattggcgaaaagaaaactccaaattcttttattgtggcctgtgacagatttatatacattgaagttctggacggcgctattcagaagaagaaacccaaagttgcaactacaaccgacactaaaaaaccggccgaaaaaccggctgaaaaagcactgcataaaattgacaaacaaaccatcgaacttattgaagccaccattgaagatatcgaagacgatgatgggtgggcatttttaggagatgttggaaatcttattgtgaagaagaaacctgaatttgacccaagaaactatggtttttcaaaacttactcctatgctaaaatcattgaccgatattcttgaaatcgacgaaagagaatctgacaaaaaaggaattaagcacgtttatgtacgcctgcgattcaattgattataaattattactctttaaatacttgcaaacatgagaaaaaaattcttcatctatggattcttattgtttctaattgttttagccatttatctttacacgaaacgaggttttttactggtgattattctgcctatattattagtggtaggtatttacaacgctactcaaaaaaaacacgctattttaaggaactttccggttttgggctatttcaggtatttatttgaaatgattgcacccgaaatccagcagtatttcattgaacgatcaacggatggaaaaccattttccagaaaccagcgctctatggtttatcaaagagctaaaaacatcgattcaaacacgcctttcggaacgcagcaaaatctgaatcatgacagttacgaaggaataaaacattctatctttcccgcaaaagttaacgaggaattacctcgtgtactggtgggcggaaaagactgcaaacaaccttatctggcgtcactatttaatgtttcagcgatgagtttcggttcgctaagtgaaaatgccgttcgtgccataaatattggtgctcaaaaaggaaatttctatcagaataccggagaaggcggtttaaccgaatttcatcttgccggaggcggcgacattacatggcagataggcaccgggtattttggctgtcgggatactgaaggtaactttagtcctgaaaaattttcagaaaaggcgaatcttcccaatgtaaaaatgatcgaaatcaaactttcccaaggtgcaaaacctggtcatggcggagtgcttccagcgagaaaaaacacggagcaaattgctaaaatcagaggggttcagcctcacacaatgatcctgtctcctcccggacaccacgctttttcagacagcaaaggtcttattcattttattgcacaattgcgtgagttatccaatggaaaacctattggttttaaattgtgtattggaaatacagccgaatttgaagccatctgtcacgaaatgatcgcagaaaatatttttcccgattttatcacagtagacggtgctgaaggaggcacaggagctgctccactggaatttgccgatggtgtaggaatgccgtttgagcctgccctgatatttgtaaacaaaacattaattggtttaaatatccgtgataagattcgcattattggaagtgggaaaatcatctcgggatactctattttacatgcggtggctctgggggcagatatgtgcaacagcgcacgtgggtttatgttttctttaggctgtattcaggcattgcgttgtcacaataacgaatgcccgaccggagtagccactcaaaacaaaatgctgatgaaaggtttggttgtaaccgataaatctgatcgtgtgtaccattttcacaaaaacaccctacattcggctaacgaacttttagcggcagcaggtaaaaaaagttttagcgaagtcgatattaatattttcatgcgtggtgatgaatttggcaatttatctgacaactatttcccggacaacttaacaaacgtaacaaaacattaaaaaaatacctataaaacagaagttaatacatagcttttttattacatttgtttagatcttatcttatttaaccactaagataaatcgttaatcttttaacctaactaaacaaattaatcaatgcaattaacacccaaaggctatcgcatagaaatgcttgatcaccatcaaaaagaaaatcttgcaaatgattttattcacggatttaaaaatgtttcagaatacatcaatggcgtttgctacgaaaccgttgcatacgttcagtatttactacatcccacaaaaatttcactccgcgaaatggaaaccattacaggtaaacactgggtggagaaattcactacacagagagagtggacaggtgaaacaattcctgcaggaactgctattggcttttatcgtatcaattcaagcggtttctttcattttgcattaggagccggaggaactcaaattcgtgccgttaacggattaacacttggatcaagctggacatttgaagtaaatcttccatctgttcttggcccaagaaacgaggatggtacctacaactatgacaatagcaaaatcagagtatatctaatgtacctctaaaaataaaagcttttaaagaaataaaagccctatccactattgttattattttaacaagatcggaagggcttctttatttataacctcttttgccaaaactgtattgtcatcagccaaaaagtaagtatcaaaccttacgccttcttcgatcaattcctgaggaattttgttctcttttatcatttttttcaacaaaattggaaatgacgaaacagctgccgatttattagattcattttcttttagattggtttcaaacctcaattcaattttaccctcttcaagataacctctagccgtagtaagcgttatgttttcttcatgaaaactcttggctgtactcttattataggtaactacatattcctggagtttttgcttggtatttttacaactaaccaatgacattactaaggccgcagcaaataaggctggtattattttcttcatcctgttttttatttttttttacaattcattaagctctaaaagcatctcaagataataataatctctctaatttctaaaactggaagaaaaacagccatattcaaactcttcaattgtcctaaacgcttactatttcacctccttattcctatctttgttccactcaaaataccatctcaaaattgaaaaagccaagaatctactacctatttgcatttctttgtgtgatttgctgtggaattctctccagaaaaattgcaatcattccactctattttggagatgcgctgtatgccgtcatgatgtatgtattagtcagaatcttctttttcaaccaaaaaaacttcgtgactgcgataatttcactggccatttgctacggaatagaattttttcagctttatcaggcagattggattattatgcttaggaaaactctttttggcagatatgttctgggacaaggctttttatggagtgaccttcttgcctacacattaggaattgtaactgcttttatcatcgaaaaaattattttaaattatactacctatgaaaatcgtattcgcatcaaacaacaaaaataaaatccaggagattcaaagtattcttcctgaaagcataaaaatagtaagtcttgaagaaattggctgttttgaagacatagaagaaacagcagacaccattgaaggaaatgccattttgaaagccaattacgtaactgaaaaatacggatacgattgttttgctgacgattcaggcttagaagtgactgctttaaatggtgaaccaggagtatattcagcccgatatgcaggcaagcaacgcaatgacgatgacaatatgaataaacttttagaggccttaaaagaccaatcggatcgcagcgcccagttcaagaccgttatcactttaaacttaaaaggagaacagcatctgtttaccggaattgtaaaaggaagtatcgctttgaaaaaaacaggaaatgaaggctttgggtacgatccaatttttcaacctgaaaattataccaaaacatttgctgaattaccacgagaagtaaaaaataccataggtcatcgtggaaaagcaactcagcaactaattgattttctgaattcaaccaaataattgtttaaaatacaacattttagagtacaaaattgatatttcgtgacgtttttttttgaagaattattctatttctggtaaaaatgattttacactaaacataactttttgataatcaaatcataacaaatacataattcttaaaagagcattagtttatctgaataattaacagtaattttgcaccctattttaaatacacatatgaataaatttgaacaattaggattgaatgaatcgttactgaaggcgattttagatctaggatttgaaaatccgtcagaggtacaggaaaaggcgattcccctattattggaaaaagacacagatatggttgcgttggctcagacagggacagggaaaacggcagctttcggttttccgctaattcaaaagattgatgctgacaatagaaacacacaagcattagttttatcgccaacacgagaactttgtttacagattaccaacgaacttaaaaactacgcaaaatacgagaaaggtattaatgttgtagcagtttacggcggggctagtattacagagcaagcaagagaaataaaaagaggagcacaaattattgtggctactccgggaagaatgcaagacatgattaacagaggattggttaacattaaaaacatagattactgtgtgcttgatgaggctgacgaaatgttaaacatgggattttatgacgatatctgctctattttatcagatactccagacgaaaaaagtacatggttgttctctgcaacaatgccacaagaggttgccagaattgcaaaacaattcatgagcgaaccattagaaattacagttggaactaaaaattcaggttctgcaacagtttctcacgaattttacttagtaaatgcacgtgaccgttacgaagctttaaaacgtttagccgatgctaacccggacattttttctgtggttttctgtcgtactaaaagagatactcaggctgtagccgaaaaattaattgaagatggatatagcgctgctgcgttgcacggggatttatctcaggcacaacgtgacggtgtaatgaaatcgttccgtggaagacaaattcagatgcttgttgctactgacgttgctgcacgtggaattgatgttgataacgtaacacacgttgtgaactaccaattacctgatgaaatcgaaacgtacaaccaccgttcaggtcgtaccggtagagctggaaaattaggaacttctattgtaattgttacaaaaagtgagttgcgtaaaatttcttctatcgagagaatcatcaaacaaaaattcgaagagaaatctattccatccggaatcgaaatctgcgaaattcaattattacacttagcaaacaaaattaaagatactgaagttgatcacgaaattgacaactatttaccagcaatcaataatgttcttgaaggtttatctaaagaagaattgattaagaaaatggtatcggtagaatttaaccgtttcatcgcttattacaaaaagaacagagacatttcaactcaatcaggtgaaagacgcgaaagaaacgactctgaaccaagagaattcaacaacaacggagctgttcgttattttgtaaacatcggttcaagagacaacttcgattggatgacccttaaagattacctgaaagaaacattagacctaggtcgtgatgatgttttcaaagttgatgtaaaagaaggtttctctttctttaacactgatcctgagcatactgataaagtaatggaagtattaaacaacgtacaattagaaggacgtcgtattaatgttgaaatttctaaaaatgacggtggcggaagacgtgatcataacggacgcagtggtggtggacgtagttctggaccaagacgcgaaggttctggaggttttggcccaagacgtgaaggttctggaggcggtggctttagaagtgacagaaactctgctccaagagaaggtggtttcagaagcgacagaaattcatctggcccaagaagagaaggtggtttcagaagctcagctccaagaagcgaaggaagttcagacagagctccaagacgctctgaaagctttggtgattcttcaagaccaagaagaccaagaagagattaatactttaatatcttaaaatacaaaatcccaaattccggacatcattggaatttgggattttttatattaaatcctgcctctctacagatgagttttaccccccttaaccatgtaatttaatcttccctatccctttttatttaaataccaaaagtcacaccgttgcctttgttaattttcttataattatattcgaagactacaaaatatttaatcgtgatttactacttttagaactttaaatcaggatatgaaatatttcgcagttttctttttcacactattatcagccatcggttttgcgcaggacactgagtctgccgttccacaaagagtttcaggctacattatcaacgataatagcaaacaacctctttctaatgtaaatatcatcaacacaaacaaagtacgtggtgcaaaatctgatgctaaagggtattttgaaattgatgttcagcttaacgacactattcacttctcgattttaggttttcagtctttaagagtccgagtaaccaatgactggattaaaaataaagtaacccgaattcagcttaccgaaaaagcaattgccctggaagaagtaattattgctccttttaatttaaccggttaccttgaagtcgattcaaaattaattccaaccaaagaaaattaccgttatagcatttccggtcttacacagggatatgaagctggtgaatattctccaaatgccttcggcaaagtattaggttctatcttcaaccccgccgacatgctctacaatttttttggtaaaaatgcgaaagagctcaagaagctgaaagaaatgcgaaaggacgataccgttcgtacgctgctagaatcaaaatttgatcgtgaaaccgtctctgtacttttaggaatcagcaaagacgaaatccccgaaattctacaacgctgtaactattcagattcctttatacaaacagcaaatgatttacagattatggatgctattagcggatgttacgaacaatataaagtattaaaaaggaattaaaaaattactcttagcttaaaatataccaaatcctcaattttaaaaattggggattttttttattctataatcgggtcaaataactttgccaaccgtagtttcttcaaataattgaaggttttcattgtttttttgagtaaattggacattctactactattaaggatcccgtttacatcaaataataccgtgaataccatgacagatattacccagaaaattttaaattttatcgatcttcagaaaggagaagaaaataaaaaatcggtaatcgaaaacataaccggcgcggtttcttttagaggatccaacatctggattcttgcctgcgccattattattgcctctgtgggactaaatgtcaactctacagcggttatcattggcgccatgcttatttcgcctttaatggggcctattgttggtgccggttttggtttgggaatgtatgattttgaacttctgaaaaagtcaatgaaaaatctgctgattgcaacagttgtaagcttaaccacttcggctatttatttctatattagtccatttaaagaagcacaatccgaattactagccagaacttctccaaatatctatgacattcttatcgccttttttggtggtttagtaggtgtaattgccgtaaccagagtagaaaaaggaaatcccattccgggtgtagcaattgcgacagcccttatgccgccactttgtacagccggttacggactggcacttggaaattatgcgtacttttttggtgccctttacctctacaccatcaactgcgtattcatttgcattgccacttttgtgattgtaaagttcttaaattatcccgttacaaaacaactggatctacaacagcaaaagagagtaaaatatggcattacactactcatttcactattaattgtacctagcatctattttgcttatcaattgtatgttcaaaaaagctacacttccagaaccgagttttttatacaaaaggaattcctcgataaggactatcctattatttataaaaaaatcaaatacagcacagctcctaaaagaattgagctggcttttttagccaaaaaattcaccgataatgaaatcatcgatcttaataaaaaattagccgaatatgatcttccaaacactaaattgattatcagacaagacactgtcaatctaagaaaagacatcatgaatcaaattaacagcaatcaaagtgtggtcgatcagaaagacatcttgatcaatagtcttcgaaatcaattggcacaataccaattcaacactacacagattaacaacgaagcaaaaatacttttccccgctgttacgtctttaaaaattggcaattacaattttgaagaagaacccaataaatcgaaaataatccctgtagttctttttcaaagcaagaaaaaaatggactcagataccaaacagaaaatgaaattgtggctaaaagaaagacttaccaaagactctgttgaagtatatcagcaaaacaactaataaataataaaaatagttcttacttttatcaatgtatcaatcaaataactaaaacagaaaattatgtcaaaaggtcaggatgctaagaaaacagcaaaaaaagaaccgctaaaaacggctaaagaaaagaaagaagaaaaaagggaaaagaaaaattcgcctaagcgagattaatttttagtcgcagtttgcagtcacagtttacagtctcagtttacagtctcagtttgcagtctcagtttacagtctcagcttacagtctcagtttgcagtctcagtttgcagtctcagtttgcagttctttaaaactgaatactgagactgtgactgaataactataacttactatttagccggaatattcgaaaggatttccaatacaaatttccagtatttctgagccgatgaaatactcgctctctcatcaggagaatgcgccccgtgaatagtcgggccaaaagaaatcatatccatatccggatagtttgttcctaaaattccgcactccaaacctgcatgacaagctactactttaggtttctcgttattttgtttctcataaattccaaccaaagtatctaagatttcagaatttacgtttggcgtccaacctgggtaagaacccgaaagttccacttcacaacctaccaattcaaaagcagaacgcaaagcattagccaagtcaaattttgaagtctcaacagaagaacgtgttaaacatccaatggttatttcaccatcttttacaattactctcgcaatattatttgatgtttctaccaaatcgtccatatcggcactcattctgtatactccgttatgagccgcataaatagaacgaataataccttcctgaacccctaaatccattactttctccggtaagtcgcattttacgatttcaatagataagttaggttcagtcgttttgtattctgtcttaatatcattgatgatttcctgcatatcaaaaatatacgcctcatcaaacatttcagaaataattactttggcaacactttctctcggaattgcatttcttaaacttcctccattaatctccgctacctgcaatccaaaattttcaaaagcatcaaacagcaaacggttcataatcttatttgcattccctaatcctttattaatatccatacctgaatgacctccattaagcccttttacggtaatgatatgccctactgatccttccggaacttcttcttcattataagttcttgtagcagttacatcaacccctccagcacagccgatatcaatctcatcatcttcttctgtatctaaattcaaaagaatctgtccttgtaaaatacctcctttaagatttaaagctccggtcattccggtttcctcatcaattgtaaacaaagcttctattgccggatgcggaatatctttgctttctaaaattgccataattgtcgctactcccaatccgttatccgcaccaagtgttgtaccacgcgcacgaacccagtcaccatcaacatacatatcgattccctgagtatcgaaatcaaaaacagtatctgcatttttttggtgcaccatatccaaatgcccctgcattacaattgctttgcgattttccattcccggagttgccggttttctgatgattacatttcgaatttcgtcttcaaaagtttctaaacctaagctgtttccaaagtctttcataaattcaattacacgctcttctttttttgacggacgtggaacggcatttaaatcggcaaacttattccatagcgcctttggttccagatttcttatttcctgactcattatatttttgtttgtagtttaacaattaagtgccccaaagttacaaagtttaaatgcttttttcgtcacaaatttcacgaattagcattaatctgatggctaaaaaacaaattccgcaaaacgtctcttttttagttctaatattgtatttatatttacgtaattcaaaactaaaattgtgaaatcgaaatacatcttgcccctatttcttgttgttcagattatccttttaaaaattctccccttctttcctgattttgtagaagggctctacagcaataacttatacgttagaatctcacatttttccagaatgcttttaggcaaaatttcattctccgtaggcgattgtatttatgctattttaattttatcagcgataagctggttttggaagattagaaaaacatggaaaacaaattggaaagattatgttttaacgatgctgggtaaaatttcaattttttacttttttttccatctcctttgggctttcaattattatcgcgaacctctattcgaaaaaatggaaatcacaaaagaatatagtgacgccgacttattagtttttacaaagaaattaatctcaaaaacaaacgaaattcaacttcttataactaaaaacgacagcgctaaaattgtcttcccatacactcaaaatgaagcttttagaatgaacttaaacggatatgaaaatctggcaaaagaataccactatttcagctatgagattcccagcgttaaaaaatcgctctttagcctgccattaacttatatggggtttggaggttatcttaatccgttcactaatgaagctcaggtcaatgatttactacctctgtataattttcccgtaacgacctgtcatgaaatggcacatcaaatgggatttgccagcgaaagtgagtgcaattttattggggttctggcttcggttaaaaatgataatttgtattataaatattccggctacagctttgctctgcgctattgtttaggaatctggcaggttaaaaatgaaactatttttaaacaattaaaaaaacaaatccatccgggaattctaaaaaattatcaggaaagccaggatttttggaaacaatatgatacttttattgataagggttttcacgttttctatgataattttttaaaaatgaatcatcagaaagacggcttagagagttatagtaaatttgtagatttgatggtgaattactacaaaaccagagcattgtaacgttttaccatgaattatatcaaagtttgcagccactgtttaccggaattaaaaaaccttttttcagctgcccttaattccagacaaccctaaccccagatttaagacaaggatccatttaaatctttataatctgtggcaaccaaaaaaaaataaacagtaccttgtaacaaaatagattgcaacactactaatacatttatgagcgaaaatctagaacagtcatttgttgcgcaattgcaggcaaatcagaatataatccacaaaatatgtagattatatactgccggcgaagatgctcacaaagatttgtttcaggaaatcaccattcagctctggaaagcgtatccaaaatttagaggcgacagcaaattttcgacctggacgtatcgagttgccttaaacaccgctattaccttataccgaaaaactaaacgaaccgtatcaaccgtagaatatgaaagtcatcagcattttataaaagatgttgattacaattatgaagaagaagaacagattaaattgatgtacaaagcggtttaccagcttaatgacatcgaaaaagcattagtttttatgtatttagaagacaaagattatcaagaaatagcagaaaccttaggaatcagcgaagtgaatgctcgtgtgaaaatgaacagaattaaagggaaacttaaaaaaatactaaatccttaaaaattattatgaaagaactggatttattaaaaaaagactggaaaaagaactcggattcttttgaacaaatatcggaaaaggaaatctacaaaatgattcacaaaaagtcgtcttcaatcgtgaagtggattttaattatcagcattttggaagtattgttttggactttgtcaaattacttttcaaatgtggacgccgatttaaaaaagatgaatcatcctgagattatcttatttatggacattttaatgtattttaattatgtcgtgatttttgtttttatttacttcttctataaaaactacaaaaccataactactactgtttctaccaaactactaatgagcagcatactaaaaacccgaaaaacggttcaatattatgtttggtacaatttaggcatgcttgtcgtttcgtctatcctcagctttttcatcgggtacgtttacaatccggatatggcaattattagagaaaaattagccttaaatggaaaagcaatgctgttctcaatcggcgcattggtactgcttgtactggttcttttcggaatcttctgggggatttacagattgctttacggaacgctgctgcgcaggttatatgcaaattataaggagttgaagaaaattgatttctgataggaggtgctaaaaaactaaggctctaagaaaccaagttactaagtttattttgaaacttgaaacttgaaactttgaaccctgaaacaaaaaaaaagcaatctaaaatctaaaatcagaaatctaaaatatctagtaatcccatcttctcattttattaagttcttcctgtactttgatttcttcggttggaataacttttaaaaatgaaggatgttgttcaatagcatactctactttttcaacaatttcttcgatggtatcgttctcataatcaatctcaagaggttccttgatgatgaaagactgtaaaattcctttctttttcagtcttagtccttttttatcaaaagaacgacggaaaccatcaataacaattggaattactacaggtttgtgctgttttataatatgtgccgtacctttacgaactggtttaaatgacttcgtggtgccttgcggaaatgtaattacccagccatcttcgagtgcaattctgatattttcggtgtcatttgggttaacatcacgtttttcggtaacgtcaacaccttttgcacgccaggttctttctactgtaattgctccaacgtaagccaaaattcttggcaataatccggcctgcatggtttctttggcagcaacataataaatattcatttttggctgccacaaatatccgatattcttaatagtatcctgacgtccgcttaaacttgcgttaaacacatgaaacatcgctacaacatcagcgaaataggtttggtgattcgatataaacaaaacatttgtatccggaagcgttttaattatttccgatccttcgatctgcaattcgttaaaacctctatatcttcggtgagtcatggctcccaaaatacggatcaaccatttcttgatgaataatatatgtccgaaaggatttcgtttaaacaatcccatagctgtcaattgtattattttattaggacgcaaacttacaaaaattattcttttaccgatcctccaaaacaatttctaaaataaaccggtagcactatgaatatcaaattgttaatttttattctttatatttttttgtcaaaagtcgcttttaaaacatctctcagttcactcaatatcatggcagttgctccccaaacgatatgattttgtatgttaaatgcgggaactaaagcgttatttgcgtaagaagttgataatgtgacttcaataacaatttcatcattcaaaaaaacagagagcggtaattctataatactcgctacttctctgatatccggataaaataaaagctcttctttggaaatacctaaaaaaggatgcaccaggaagttgcttggcggaatatacataggtgtaaattgtttgattagctctattctttcaggtgcaacgcctacttcttcatgtgtttcgcgcaaagcagtctcttcataatttgcatcagtcgtttcatattttcctccgggaaaagcaatttgagacgaatgaactccattatatgcatttcggacaatcaatacgagatgtgttttattgttttttggataaaacaacatcatgaccgctgcaatacgcggatttttatctttcaaatcaagattcttcaaggcttcgaggcgttcttttggagccattttaatatgagccaattccgccggcaatactgccggaattaaatcaggaacatattgtaaaaagtcttgaaaatccataagcaaagtttatttttgtacttttaaataaaatataaatatagtctagaaaacgcggttctacaagttttctaaaatcaagtcttaaaaatgtacagtaaagaagaatcacaaaagataaaaagagaattctgggtggcattcgccgaaaaatatcctcgtaaatgggtactttacgataccaaaattaaagatttttcctttaaattttatgtagataataaaaaagcacaggttctaattgatatcgaacaaagaagcgatgaaaaacgaaatgcttactttgaaaaaattgaagcattaaaaaatatactggaggaagaattcattaaagatttggttttcgaaaaaaactacactcttgaaagcggtaaaacgatcagtcgaatttggatcgaaaaattaggggttggatttagcaatcgcaataactgggatactattttcgatttctttaacgaaaaaatgcatgctttggaaatgttttatccggaatatgatgagtttattaaggatattgattcttaagagaaagatgctaaggctctaagtggctaaggttctaagaaaacatattaactcttgaaatgttttatccggaatatgatgagtttattaaggatatcgattcttaagagaaagatgctaaggctctaagtggctaaggttctaagttgctaaggttctaagctgataagactctaagaaagtttactaacttagtagcttagaaccttagccactcagaacctcaaactacacactaaccatattatacacaataatacggtcgttgtagttgatgtaaagctgtttgcggaaatcctgtttttttcgggtgatgatagataatttacaggctttgccgtcattgtctttacacataaaagaatagacaatatcggtatcattttcttccctctccatgtaatccaaaatactaaaaagctgtatttcctgcgagtagaccacaattctgtgtttattggtatccaaaattaccgaaaggttaaccaaatcaagatcggaccattctccccatttgcctttttcatttttctccaggacactaaaacccgatgttttgaactggtaagactgactaaaagtttgctgtaaaccaagtcccaaaaaagataaaagtataaaagtgcgtatagaattcatattgtatttcttgggggtaatttagaactcaaatttagccttttcctggcaggcagcttcaaaatcggacatcatttgttgaacaatttgctctaccggcaaaatttcatgaattaatcctgcaatttgacctatttcaagttctccttcttcaagatctccttcaaacattccttttttagctctggctcttcctaaaagctgcaccaaatcatcctttgaaggacatttttcatacaattcctgaacgtcctgatagaatttattcttaaccaatcgaacaggtgccagttcttttaaagttagttgtgtatctccttctttaaccttaacgatcgtttctttaaagttatcatgtgccgaagattcgatcgaagctgcaaaacgacttcccacctgaacgccatcggctcctaaaatcattgcagcaagcattcctctgcctgttgcaattccacctgcagcaataagaggtatctgaactttctctttcaccatcgggattaaagttaaggttgtcgtttcgtcacgtccattgtgtcctcctgcttcaaatccttcggcgacaatagcatcaacacctgcctcctgcgcttttaaagcaaaaacagtgctgctcactacatgtacgactgtaattcctttttcttttaaaaacgaagtccacgtttttggatttccggccgaagtaaaaacaattttcactccttcttctaccacaatatttattatttcttcgatattgggatacagcatcggaatgttaactccaaatggcttactggtcgctttttggcatttctgaatatgttcacgtaaaacttcgggatacatagaacctgctccaattaaacctaaacctcccgcattacttactgctgctgctaatttataaccgctgttccagatcattcctccctgaataattgggtatttgatcttaaaaagttgtgtaattctgttcattcaaaaatgtaattattgtttaattatctttcctgttttatgaagaccatctgcatcaaaagtataaaaatacaatccgctttttagtccttcaacagaaagaatagggttttgatttgtaatttgtttttcgattagcttttgccccagaacagagtacacagaaacagaagcggtactgttttcaaacaaaaaggaaatcgcagtcttagttggatttggaaaaacagaaaaaacttcccctaaagacttgaaatcttccactcctaaagtggctccaaaattaggaattccgtaaccataattattatttggtgccgtatatcgatcagaagactgcaatatcatctgcctaatttctttattcgttttggatgggaaagcctgccataaacaagcaatcattcccgccataattggacaagaaaatgaagttccatttattgttgtaatattccccccgctatcagatacaacagcagccgtaccttgtgccataacatccggtttaattcttccgtcataacttggtcctatcgaactaaaacctgatctaacttttgaagaagttacagcacctactgtaattaccgaaacagcatctgcaggtcctccaatatgaggttcagttgtagctccttcatttcctgccgaagccaccacgattattcctttattaaaagccatttcggcaccacgggagataaaattagtcaccccgttcatatcgctataagcatgcgtgtagtttggattgtcaaattcaaaataccccaaagaagttgtaataatatcagctcctacacggtctgcttcttctgctgcctctacccaatacgattcttctaccggattctcagtagcatcatattcggtgatgtataaataatacgaagcatcaggagcagtacctaccagagcattttctttataaccgcccattgtcgaaagtaccattgttccgtggctgtctcctgaataaaaattggcatttctattgacataatcgtaccctcctaaaatctgattattatcgattaatttcttaaacggtaaagttgtattaactcccggaaaacctgcatctaaaacggcaattacttttcctgagccggttttattctgttggtgcagcacttttccattcagcatttctatctgccctcctgaagttccgtacgcataatccgtttttgatttcagtttgtcttttacctgacttatcttattctcagttacttttttagcagttgtattcagatttttattggcaaaaaacactttatcgacaaatgacagcgctgtaagtgctgtaatatcggtttgagttcctctaatatgaagtgcatttagccatttcgattttgccataatagttatccccgaactcgatctaacctgattgatataagagtcctctacaggtgcatcggtaagatctaacgcaatattttgattggctcttcgatctaaggcacgctgtgtcaaaattgtaagcggagcattaagagatgcctgtgcgttgggtttgtttttaaagtatacccatgcctcttcctgcgaaaacaccgcggaagaaaaaatcaacaacaaaaagacaaaatagtgcttcatgattacttttttaaaggtgaaacctccgtaaaaaagtataaagctaagaaattactcccgaaccaactaattcattttctaaataccacgctacaaactgaccttcagtaatggcggactgagcttcctcaaagcgaacatacattccgttttcaaactgatacaagattgctttctgtagtggctgacggtaacgaattcttgccatcacttccatttgctcaccttccttcaatttcaaatcttcgcgaacccagtgtacttcagaattccccacaaacaatgcctttttgaataagcccggatgattactcgttaaaccggtataaatggtattcgtatcaacatccgtagcaattacaaataatggatctgtagtaccgccaacatttaagccctttctttgtccgtttgtaaaataatgcgctccctgatgtttgcccattattttacccatcgttggaagataatttagtttttgagattctactttcaattcgtcttccagagaaattccttccggcttttcaatcgtatagattgggtcgtttttatcaatttgaacaataagaccttcttttggttgtaatttttgctgcaaaaactccggcaaacgtactttaccaataaaacaaagcccttgtgaatctttcttttcggccgtaaccaattccatttcagcagcgatttccctaacctcaggtttagtcaatgctccaattggaaataatgctttggataattgttcctgagacaactgacacaaaaagtacgactgatctttgttcacatcatttccggcaactaattgataaaccgtttttccgtcgacttcaatttcgcttttttggcagtaatgcccggtcgccacataatcggctccaagacttagagcgattttcataaaaacatcaaacttgatttcgcggttacaaagcacgtccggatttggggttcttcctttttcgtattcgttgaacatataatcaacgattttctctttgtattcttcgcttaaatcaacagtttgaaacggtataccgagtttttccgctaccaataaagcatcattgctatcttctaaccatgggcattcattagaaatcgtaaccgaatcatcgtgccagtttttcataaaaaggccaataacttcatatccttgttgctgcaataaataggcagcaacacttgaatctactcctccggaaagtccaacaactacacgtttcattctaaattgtttatgtttttacaaggctgcaaagataagccctatttttgaaaatcgcagtagtttttgattagtttatacaatgccgctgtaaataaaacttattactttctaacaaatttatgcgtgattaatttgccctctctcatttcactaagaaaataaataccgctggataaattttcaacatttagtatgtcctctatattagccttcactttaaatgttgttatagttttccctaatattgtaatgaggcttaaagtcgcatcgtgatccgatctaatcgttataatcttattacttggattgggatatatcacaaagtttaagtttttatcaaatgatacggtgttcaggttattgtttggaacagttccggaaatagtataacttccgatagaaccatatgctgagtatcctccattggttgcatctccggccccgataccattaatactaataaaatacttgcctgccgtcagatttacatccattgaagcatttaactttaaaggatcagaatcccaatattgtcccatttctacaccttcggaattatataatttaattgaaagatggagattaccaacattagtctttgcacttgtattggcggtaatacgaacatttcctcctgtagtagtaaatgcaaagaaatcattatctccttctttttcgattataccttctttttgagtaatctttcctttattatccaaagttaaactaaatgctgaagaaggaccattaccatagtcatcggctctatacgctgctactccaaatccaacaaaaccagggggagagccaaaactagaaattatagcaacgtcatcttcattattatttgcactattatactctcctttgctccattgtgtaataggtctgttataaccagctcccataattggcgcccaagaagttccgtttattcctgcaaaatactcttcctttggagaaatgcgcccatcatgctctaaaccaaaagtatgacctatttcgtgcgaagcagcttctcccccacgtttagcactagaaacattaaaacaccaggccggaagcccataaccaaaggatcctatataggctacacctccacttcccggagctgctgtatttgtcggagttactactacacgcagccttaaactttctttatacttattgtatacttcttcacttgttgttatattcaaattaaacggtttataatcttctgaaactatttcaaaaaattgcaatatatctgcatcactcattccggatggagctgcatcaattgcgttaccattattccacttatttcccgcgggcaagtaatgtccgtcaaaatctaataatacacaactgcgtccacctggcaagctctctaaatttaataacgcagcactaattttacctgaactgttttttgatgtttcgcttcctccctggggtatattttcgtaatctatacaaatcaaagaattgatatcaacttttgacacataagcttttccttgaaaatcagaagagtacttatatgcttctctttctttttttaaaataatgtgtccttccagagattgatctgttactttgataaaaaaagaggattctggcacattcttgatttctccaatcaaaaattcacctgaaactgttgattccttataattcacttttccggtaaacttttccgaaccaacaatttgaagagaaatgcttttcatttcaccttttttattagaaccatcagaatgattcttcgtaagctcttttttgagattactcataaaaccatcacatgtacccaaagaagtctgggaaataacaacattattaaaaagaacatttaacaataaagtcactacaattttgtacctattattcatacttaattattttttcactacaggaatttcaaaaaaactctaaatcaattacaaccttatgtagctacaatcgataatacaaatgtagtcttttatttacaataaacataagagatcaaaaaattaactccctatagacaacgcaacactaaaaagttctcattgaacgaaacctatttaaattgaaagattactcccggaactttcctcaaaatgagacaacaaaaaagtccgcaaagcggactgatataacttactcggccttaggttttgaatcggcctgataactacttttaggatcactcatattaacttccttcgttaattttcctttaaagtaaaactgccacattccggatttcttccctctggtaaattttcctttagaagctactactccatcagagtcataaaaaacagcatcgccattgtattcgttattcttaaaagtactttgttccaatagaattccgttttgcccgtacttcttataaaccccctctttcaaaccttctttataagtcatttcctcggcaattttagaatctgcataaaaaacagttcttactccttctaattttccggctttgtatttttcaagtgtcataattgctttcgaagccttatgatagtacttccactcaccttcacgcgattttccgatttccttaccttcgcttactttatttttattctgatcgtaaaaaatagtatacgaacttccatcgtttgctgtaaaatcacgagttgcgacaacatctccttttttagtatcatcaaaaaatttaaacactccggtttcttttccgtgactaaaagttccttcataacgaggacgtttagaaacttcataaattcctttccaaactccgtcttttttcccgttagcatccgatttattaacctcctgcgctactgcaaaaaaggtgtttaataaaagtaatccggctattatttttttagaaatcatatctattatattctattttaaactttaacgattctgactttgattaagtatatttcagatataaaaaaatcccgaagaatcgagatttttttattggtgttatttctttttattctgagctttcgcagcttcttgctgttccattacttcctgaagacgttgttgaaacttactttgctttttaggctcttttaatttattttcctgaatctgagcgtgaattttatcactatccacaatgtaatttttaattacatacatgattccgattgtaattaagtttgaaataaagttatacaaactcaatccggcaccataactattgaagaaaattaacatcattaatggcgacacataaatcatgattttcatcatttttgccatatccggcataccttcttgctgaggcgctgccatttgctgatctccggatgtcattttcatgtagaagaaaatcgcaattgctgccaaaattgggaacaaactgatatgatctccatacaacggaatgtggaatggtaattttacaacagcgtcaaaagaagacaaatcgtctgcccaaaggaaacctttttgtcttaactcaaaagctgaaggaaagaactggaatgaagcatacataaaaggaagctgaatcaaggccggaatacatcctgccattgggtttactcctgctttgttgtacagtttcatcgtttcctgttgttttttcattgggtcttttttgaatttttctcccaattctgtaatctccggacgtaaaactttcattttagcctgagacaggaatgacttataggtaattggcgacatcgccaatttaataataatcgtaaagatgataatcgcaattcctaatgataatccaattgtcgagcttaagaatccaaacaacggaataaaaatcaatcggttgatccaaccaaaaataccccaacctaatggaatgattttttgaaaattcttatcgtatgattttaggactttataatctgccggtccaaaataccattgcattttataatcaatttccccattagagaatgctaaaggaacatttgttttaaactgtttcgtaaaaacagtatctatcttttcatcattcactaaattagttgattctaactttgatgttgtgaatggtttatccgttactagtatagaggtaaagaaatgttgtttataagctataaaactaactttttcaacggtttcttcttcatgttttcctaaacctgcatagtttattttaccatcttcatgctcataataaatttcagcataacggttttcatacgaaatacttttttcgtttctgtacgtttttaaatcccactgtaaatctaatggctttccagtatttaaaactttgtttaatccctgagaacgaacatcaaaaccaattaaataatcatttggcttaagaacatatttgtattctaagaattcattaacacctgctttcaaacgcattgttaaaatttgatctgcaccatttttagttagcgtaggttcaaaaaataaatctttagagtttaaagttctgttatccgcagtttgcaactgaatgtttaaactagcattattgtctttaatcaattcaactaattgtcctgaatttttttcaaactttttgaactctttcaacgtagcttctactatataaccacctttgttagcgattttaagtttaatcttttcgttttcaatagttgtaaaaccttctttagcagaaggtagtgtagctgaataagcaaaaccacctaatgttttttgtaattgtgccaactgcactgtatcaccaggagttgtagctgcagcaaccggtaaaacagctgttttagttttatccgctttcgcttgtgcttcttgcttggcaattagttcttttttggctttttcagcagcaatctctttatcagaaggctgattttggtacataatccaaatcaaaattccaaatatcaatacaaaaccaatgattgaattaagatcaaattttttttcttccattacagtttaaaaagttattcgttaaaaaggtattagtgctgaattagattcaaacgttacacttttcagaatattaattattattttttatgcgcattcactgcagcagccacaaagtttacaaaaatcggatgtggatttgctactgtacttttgtattcaggatggtattgtactccaatgaaaaacgggtgattttcaagttctacaatttctaccaaacctgtatccgggtttacccctgaagctttcaaacctgcattttgcagttcatcagcatatttgttattgtattcataacggtgacggtgacgctctgaaattgttttctgaccgtagattttatacgccagcgtatcaggtttgatatcacatttccacgctcctaaacgcatggttccgcctttatctgtcactgttttttgctcttccatcaaattcaccaccggatgaggcgttttatcgttcatctcagtagagttcgcctctttgtaacccaaaatatttcttgaatattcgattacagacatttgcattcctaaacaaattccgaaaaacggaatgttgttttcacgtacataacgtacggcttcgattttaccttcaatacctctttctccaaaaccaggagcaaccagaactccatccagacctgctaatttttctacaatattttcagcattaatatgttctgaatgtatcgaaattacatttactttcgtttcgtttgctgcacctgcatgtatgaatgcttctaaaatagatttataacaatcctgcatttctacatattttccaaccaaaccaatatttacagtatgttttggatttttcagtcttttcaaaaaggtattccagtttttaagatccggtaatgcttttttaggcaaatctaattttttcaaagccactacatctaatccttcttcaagcattaaatttggaacttcatatatggttgaagcatcaatggactgaataaccgcttctttcttaacattgcaaaacaaagccagtttttgacgcagttcctgagacaattcatgctcagttctacaaaccaaaatatcagctttgataccactttccatcaaagtttttacagagtgctgtgttggttttgttttcaactcacccgcagcagccaaatatggaaccaatgttaaatgaataacgattccgttattttcacccaactcccacaccaactgacgaacagattctatataaggtaatgattcgatatcaccaacagttccaccgatttcagtaattacaatgtcataatcgccggatttacccaacaattgcattctgtctttgatttcgtttgtaatatgaggaactacctgaactgtttttcctaaaaactctcctcttctttctttttcgattacagaaagatatactcttccagttgtaacgttattcgcctgagaggtaggaacgttcaaaaaacgctcgtaatgacctaaatctaaatctgtttcagcaccatcatccgttacataacattctccgtgctcgtatggattcaacgtacccggatcgacattgatatacggatcaaatttctgaatagttgtacggtatcctcttccttgtaacaattttgctaaagatgccgcgataattccttttcctaacgaagaagtcacaccgcctgtaacaaaaatatattttgtttgattcattctgttgttgtttgtatgtagttgtgtaaaaaacttggcaaaagtacaaatttaattagacaatttatcaattcacgaatgagataatttttaattttttaagcacattttattttaaatactttaccaatcaattattttatcaaaatgagtgttttttatcactactaactaaaaatccataagtaaagcctaaaaatacaaactaattaatttctagtatggaagtatcaaattataaaaacaaaaaagaaaagaaactgcacttaccgaaatatcaaagactaatacaattttaaataggaaaaaagaaatgatgccattgataaaaaatctcgcaataagctgaaacaaaaagaaaccaaagatttttatactaaattgattgtaaataatcgcttctcgaaaatgaaaccgaagtatttgagaaaaagcccttgtaagccctcgacttttacaatataccactggcaatccttcgcaggatgaacgtaaaccaaaatttaaatatgggagaaaaaagcaataaaaaaagataaacataattatgacgatcaaaattacgtttatctttttataagaatcaattccttgataaaccatcatttatacaagaaattattttacagtagcctcaattgtagtagtatctacctgtacttttatattcaaagaatcatctgtttttatttgttccactttagcagaatctaaagctcttttgatttcatctttatgttctaaagcaagagaacctattgaaccaacaaaaacagcaatccagataataacaaaaactgttgctgcaattcccagatataatccggcttttggtaaagaagttgaggcattttctttttttgcctggtttaaagcaattgctccaaatactattgcaagaattccaaataaaactgcaataaaaccaaagcaaggaataaatgctgctaatacaccgataataccaaaaattaaagcgataatacctaatgactgaccagcatttgaagaaggtgaattgttttccataaaaaattgtttttgttagttctgacaaaattagaaaacgacttacacaaactgaaactaaccgacctaagttatcaacaattaaattaacctgctttttctgagtttaagattaactatttgttaaatctatttaagcctatatcttaaattatcgaagaaacgttcaatcaatcgtctgtcttcagtaataacctcagcggttcctttggcttcagcgtgaaaattcaattcaactccgtaattcgtttttaatccgttaggcaagtctatatctacaagataagagttgattttattctgattatctgaaagcgtttgttgattagtaaccaatgaaattctcttaacttttccttttatagaaccgtattcgttaaaaggataattgttcagttttacgattaccccttgtccgactttaacttttcccgaaccattttccggcaaatttacctgaccaatcatttgattgttatcaggtacaatcttaaacaattcctgccctgactgaatataatcgttgtttttaagaaaatttaaaaaatatactttaccatttataggagtaacaaaaacataagtacgctcccattttttaatagcctcaagtaagtcatagtaactattaaacaggtttatgataatctctcgttccttggttgctttttcgatagcaatcacttgagctttattctgagcttcattgatttggtaatctgtcgtattgatttctttgtcgattgcgttataatccagctcgctgttagcttttgcaataatagaatgctcaatatctgctttggaagtcacatttttagtgtataaaagtgaatctttcctgaaaagacttttagaagtcgtgtattttaccttttgattctgataatcattctttaactgatctaactttttaatctgaagtctgagtaacttttgatttattcccttttgaacttcataaggctgttgaacgttataatccagatattgatacagtgaatttaagtaattgaaatatttgttgctcatttctcccagagctaagttttcaggaaaaaaatgcctatgctctttgtacgtaatattttgtatatttactttacgaagtatctgctccaatgattgaacatcttttaggtttgcttcattttgtatgtaagcaatataggttcctgtttttacttcggctcctgatttattttgtatcaatataatattcccagctattgaggatactagtttaactggagcttgtcgtgtgttgattacaatttgacctgacaatactgaaggatattttataagccatccgaacaaaaataggagcagaaccaatcctatgacaatacaactaattgttgtgccaaatttcgttggcattttttctattattgaaacaacctcttctgttctattttcgttgagtgttttatgaaatcctttactaaccatttacagcacctcctatttgcgtttttaccaattgataatagtgtccgttctctcgtgtcatcagcatttcatggtttccaatttcagtaataaagccatttttaagcactataatttgatctgcttttcggatagtactcagtcggtgtgctacgacaattaccgtcttgtttttaaatatttcttctagagctgttacaattttttgttcattaataacatccaatgaattggtcgcctcatcaaaaaataaataatccgggtttttatagagtgctcttgcaatcaacacccgttgcttttgtccgccactcaaccctcttccgttttctcccatcatcgtttgataacctttgggcatggcttcaatctccgcagctatattagccgctgttactgctttctttaaacgctcataatctacgttttcatcatccaagacgatgttattttgaatggtgtcactaaaaatcttaccgtcttgcatgacagcaccacaactttctctccattgttttaaattaatattctgaatgttaagatttcccataaccaattcaccatgtgtaggtttgtacaatcttaaaataagttttaacaaagttgttttaccactaccactgtcaccaacaattgctgttacttttccttcaggaattattaacgaaacattactcaaaatataatcgccattgcggctatattgaaaacttacatttcgtaaaaacaagcttttatcttccggcagcctgatattattattaacctcattttcttcctcattctccaattcatgtatttcattcaatcttaaaaaactaattttggcatattgtgccgactgtacaaaagagataaactgcataatcgggccatttaacatcccgattatgaactgagtagaaatcatgaccccaaaagtaatatctccctttattactgcttttgcacaataaaacgtaataattaaattggttagctgattgataaactgtgcacccaagttttgagcattagtgatgcgtaatattttttgatctattttaaatagttgtacctgcagcgcttcccatttccatcttttttgtttttcgtaattgtttattttaatatcctgaatacttccgattgtctctacccagtagctttgatttttagtgtgaatatcaaaatactcccaatccagttttttcctgaactggagaaaaaacaaaacccacaaaataaacaatagacttccaacaacataaatgagacacaaaacaggactatacacaaacagaatgattccaaaaataaaaaaggttaaaatcgaaaataaaaaattgagcgagttgttcatgataaaatcccgaatacgctcatgatcctgtgctcgctgcaaaatatccccaattagtttattttcaaaaaacgtaataggcagtttcattagcttaatgagataatccgatatcaaagaaatattgattcttgacgtaagatgcaataatatccaatcacgaatcatattactcaataacatactaacaataatcgtaatgtttgctattaaaaccaggtcgataaaatccaaatcattggtttgaattcccacatcaataactgctttagaaataaaaggtaaaaaggcctgtaacatggtaactattagcattaccacaaacaagtttataaagctttttttgtagggtgtaaaatagcccaaaaaattctctaaggtcttacgtctttctaacttatcatttatggaacgttgcctaaaatcggccatgggttcgatagccaaaacggctccgttctttgacttttttagccagccttgcttaaaatcttcaaatgaatacttcactaagccctttgccggatctgaaacccatacctgattacgcgttattttatacactacaataaaatgcccttcttgccagtgcgctatacaaggcaggggcaatgtttgcaagatctcaaagtcgactttaatactttttgttcgcagactaatagcctcacaagcatcactcaagtccaaaaaactaacgccttctcgtgtaataccacacaaatcgcgtaaaaaaggcagactataaaacctgccgtaatatttggctattatttttacacaagtcgggccacaatctttagtatcgagctgaaactcgtgaggaaaattaaacattctaatttattttttcatattttcttagaaggatacatactatccaatgctttttttggcattacatctttcaacctttttctataagaaattgtataaggaccaactatccatctagtaagattagatctcaaatgaaaattataaataagtaactcttcatatctccttttgtatatcatttgctctattcgtttaaaagcatttttatcattcctgtactctctataatttgttccatatgatacactccacattctattggcagtatttatatcagttctatcattttgctttaattgaatcaaaactcccctagtatcatttataaaatgagattcgaaacctattatatttagctcttcatcaattacttcatacaaactatctaacttctctttataatcaactttaagaaattttttatcataatcaatactatcatttggaggcatataagaaagtaaactgagtgtatctgcatatgattccggtaaacctatatctgcttttaactcactaaactcatctttcttatcttcctctatttttgtttcaatcttaaatttctctttgcaagaaaccatacaacacaatactaaaattatataaccaactttcatatattactttttaagacctaattctataagttctttatttgcttgttctggagttaataatcttccattaataaatgcctgagcttcaaaataccttctttccatcaatcctttttttggatccgcatttagataagcattttttattgtattatttgctgtctcgacatcacctgtttttaacgcattcaaaacacttgttactatactatatttatcagtgccagcattaaaagccatatctgccaatgcgaaatactgatttcgagttattttattccctaaatccatgttttcaattttttgatttaaactattttgcgtatttactaaatcaatagctaaaaaaaataatagcatcattcatactaatttttttcatatcatttgctcttattgggcctgtatgaagcaagtgcccaaaacctattgtagtattacctgcggaacttccatccttatcataaactgataaagatagcttttcatataatgcaattgctattgcagcttcttcattcagcttcatagtcggctgaaatctattcatataattaaaatcattttttaatggatcccaatctgtaacagattctaacgacatccctgagaaatcatttcttttaaatccgtccacaatttgatcccttgtaaatgatgtcaatacagctgactttaaaactggttgaactgtacttgttgagctagttcctgtatttacacctccatcattattagctggattactaatttctaaaataccattattataaaacattccttgtggaattgtactaggccctttataattatttgtcacatttacattattcaaaatattaccatataattgaatattattttgcttttgtccagcgattgtaaattcattagtaataaaaacatttatttgattattagttaaaacaccattattcgcatataaaaaatcgaaaaaacggctaattgtgttagaattagtggttgtgaaaccataacgattatctacccagccccaatctccattaaaattatctctagatgaatttgaatttaaattattaatccctgtcatatttccattattattcatactattaagtcccgtctttattgagatgggattttttttatagttttgttaaaataatatcattatgtctttattttaacaaatgtttaaattgaattgtgactaaattatgaaaagtagcttttttcttgccaacgaaaaaaagcattaaagtagttcatcgagatagttttacacttcatcgaaaagtaattaagatattggaaaataggtatttatacctgttttggttggcgataagttttctaattttgatcatgaaagaaagaaaataaggctttaatttttattttcgaatggagattttgattgcatgatttccctaaatcacgctgacctacgtaataaaatgtattaataaccaattaaatatatttattatgaaaagagcaattttaagcatctccgcgatgctgtttgtaggagtcgcagcttttgcgcaaggtaacatgagtgatgtggaccaaacaggtttattaaatggtgcactggtagttcaggtaggagcaactaatagctcagatgttgaccagataggtattgccaacgttgcaattgtaggacagtacggagatgataacgagtctactgttggacagttaggaggaggaaatgttgctatagtaacacaaattggagacaataacgattctagtatcactcaaggaatctggttcggtaatcttgcagttactactcaaattggagcttacaacaattctgatgtgttacagattggtaactttaatacagctactacgaatcaatttggtcttgctaataacgctttgactcttcaattcggatatggcaacaccgcatctaccgatcaaataggactgtttaacaatgcagctactctacaattaggctgggataacacctctagtattcaacaatacggagccggtaactttgcagctactgcacaatttggaaatgatcatatgagcacagttactcaaacaggtttcttaaatggaagtgtagtaattcaatctaactaagaataaaccaggaaaaggaagagcttgagctattaagctcttcctttttttaaattacaatatgttatgaaacgtttagccacttttgtatccttactaatcaccgggattttattcgctcaggtaacggatatgaatagaagtgactatttattaaatgaagcatacaatcgcaatcaaaatcaaacggtaaatcaatatattaaaagcaacaatatcgtaacagttgctcaaattggaaattacaatcaagccaatttaaccatcataagtagtaatgcttatgttaccgcacaacagacaggcaacaacaactacatgaatgtctacaaaaatgctgatgaaatcaatcagtcctacacacaaacaggcaataacaattatataagtgatttttcgatgtactcacgcggaatcacttccatgggaatcaatcagtatggcaataatttatcggtaatcagtactggttcaaattcgatatctaaagatttaataattaatcaaacgggaaactcggggacaatttacatattcaatcgctagtgtcatgaaaaaatatttgaacttactaattgcattttttgctgtttttttttctgaatcaggattttctcaggaagttcacatagaagtaaaagccaaaatagaagtaaaagaaatagaaaatttacttgctattacgggaactgcagaaaacttaaaatcgcagtttaaaaatatatcttataaattgactgtatttaaaaaaaataaaaaaaactcgaataaatcaaataatgctcaggatggcagagtcacattagaaccgattcaaaaagttgaactttctaaaacgcaagtcaattttacaccagacgatgagatcatcatattgctattgatttttgatgaaaaaaatgaattgataggcaaagaccgtgttgtttttggagaagataaagtatcagatgccgctaagccaattcctgtagatggaattgaaatgatcgggatcgttgctaatgataccaaaacaaaactgggaaatgatttttatgattttttttatgcacaatattcaaagctaagaataaatacaagtaaaatcgtgaccgttcaagaggaattgacttttggacgtacaacaaaaattactattctgatagatggagaaatagtagaagaatttatttcgcgtccggatgaagattttttaaaatacatggcagaatctgcagcatcaaaagcatttaagtattttaaagacatcgaaaaacagaataaaataataactcagtattaataaataactcaatattaataatcgagaagtaattttttgtagaggagtttttctttttttttaatgtaggaaactaaataacagcaatatgaaaaatttaatttcattcgtatttgtgttggttttttgtaccgtttctttcgcacaggatcttgcttataagcctgtaaatccagcttttaatggtggtgaaacttttaattatcaatggctgctcagttctgcgcaggcacaaaatgattttaaagaagacaatacaaacggatacaaacagccaacagatctggagcgttttaaaagtactttaaataaccaattgctcaatagaatttcaaattcattatttgatagtcaatttgggtcaggtacaggttctggaggtggtaccggaggcggtacgggcggaggacttactcctggtaattatgtcttcggaacgctgtctgtggatatttacaattctaatttaggaatggttgtcaatattctggatattgaaactggcgagcaaacgcaagttattataccaggtaaatagtctggtactcgatttttataaaaagtaagttcatgttttattattaaaaaataactaattatgaataaaactctcctttttctactgttaataacctgcctactctcaggatgtggcgcgtattttaatcaacccgtaggagttcagaaggctgtttttggagaaaacacttctgcaactgaacacttagtcgatatgccaaaaccaaaagaacagattgtggtaggggtatataaatttaaagaccagacaggtcaatacaaagcgactgaagttggaagcacatttagcacagcagttactcagggtgctacttctattttaataaaagcacttcaagattcaaaatggtttgttcctatagaacgtgagaatctgggaaatttattaaacgaacgaaacattatccggtctacacgtcaggaatatgaagccaaaaaagaaggcggtgaagcagtattgacgcctttactctttgcaggagttttattagaaggtggtattatttcctatgacaccaatattattaccggaggttttggagcccgatattttggtgccggaggttcgacacgatacagacaagatcgggttacggtatatttaagattggtttccacctcaaacggaaaaatactaaacacggtttacgtttctaagaccattttatcacaaagtatagacgccagtttatttcgatacgtaaatctaaatcgacttttggaagtagaaaccggttttaccagaaatgaacccattcagctggcagttaccgaagccatagaaaaagccgttgaaggtcttattgtacaaggaatcaaagacaagctttgggaagtgaatgcgcctcaaaatcaaatcgatgcttttgtatcagcctatgatgcagaaaaaagcgaagccgatctggcacaattatacgatagaaatttagaagacaaaagaggcctttttggtatagaggtttccggaggaacagccattatacagggcgattataaaagtccggagccggcaccaatgaccagaggagcggtgaaatattttttcactccggcttttaatataagtgcctcggccaatgcgttcaaaattgcgaataaaggaagagacaaattaggatatatatctacagatctcaatctcgaatttatcatattacctcacgatatcctgactccatttgtttttggtggttacggatttgaatttaataagaaatataaaaattttcatagtaaagttcagtttggaggtggtttagaatatatggcgaccagtagtttgggagtgaaattattcgcagaatataatatgacctttagcgacaatgttgattatatcgtaagaggtaaaagagatgattattactggagacttggtttgggactcacttattactttccaaaaagtaccaatcacaagaaaagatagttcgccaatagaaggtgaaagaacaatattttttcaataaaaaatatagaaaaagtcaatataagtttaacaaaatcaagaccgcaatgaaaataggactaaaaatattgatatgctttatgcttttggtttcttgtagtgaagatcaaatcgatgaaacaggaacgggagcagtaaaaggaagagtagtagatgcccgaacatatgaaggaatagaaaacgcacgtgtttcttcaagcccaactacgagtaccgtatttacggataaagacggatatttcgagataaataatataacaatgggaaaatattcttttcaggcccaaaaagatggctttaccgccagatttgaacctgcgactgttgagaaagacataacagttcagattatttttgagttacaagtgtcaactgccaacaacaaaccaccagatgttcccatattaaccgcacctacagacaatgctacagggcaatcgctaacactagatttaacctggacagcaaaagatccggaatcagatccgatgacctataccgttacggtgaaaaacggaacaacagacgaaacgaaaacctatgccaatttaaaagacacaaaacttaatatttcaggtttaagttttagcacgaaatactattggcaggtaacagccgatgatggaattaataaaccagtaaatagtgtcacaaactcctttacgactttagcatttccaaatccgagatatttgtatgttaaaaaagtaaaaaataacaatgtcatttatacagccgatgaagccggaaacgaacttcaattgtcatctgccgaagtaaacagctacagaccgagaaaaaatttaagcatcaacagaattgcttatataagttctgacggatcattaaatcaaatttttacaatgaatccggatggtactgatgtcaaaaaaattacaaactttatacctatagcaggatttaatatggagtatgttaattattgctggagcaccaacggaagacaaattatttatccaaattttgacagattgtatcgcattgattctgacggatcgggattgattcaattgtttaaaacgccaaacggaaaattcatttccgaatgtgaatggagtcaggacgggtcacaaattgtacttaaagtaaatgatatgtcgggatacaatgttgagatatatgtgatcaataccgccggtgatgtattgtatcaggtactttccggagtaacgggtggagcaagcggtcttagtatttctgtagacaatagtaaaattgcctataccagagatatttcaggattcgaaaattcgacttacagacgattagactccagaatatttatttacacagctgcggataatacttcaaccgaattggcaagtcaaaaaccaaatggatttaatgatttggatgtaaaattctctccaaatgaagcagagctgatctatgtcaatacatcaaatgatggtttatcagccaacacgatacaaaaagtcacgatttccagcagcaatagtaatggttccagaacaacactatttcagaacgcctcaatgccggattggaggtaaaatactaaaaacttaatttttgataaccaattttatagaaaaaaatcggcagtgcctaaaagcctgccgattttttttgcgaatcagagatacgaatcaatcaaagaattaaaaaaagggattatctttgcaccacatcaacacaaactaagttacatgagttcagattctagcaaaaggtacgcacaaagaggtgtttcggcatcaaaagaagacgtacacaacgccataaaaaatattgataaaggtttattcccgcaggcattttgtaaaattgtacctgattatttaacgcaagaccaggagcactgtttgattatgcatgccgacggtgccggtacaaaatcatcattagcctatatgtactggaaagaaaccggtgatatttcggtttggaaaggaattgctcaggatgctttaatcatgaatatcgatgacttattgtgtgtaggagcaaccgataatattttgctttcttcaacaattggaagaaataaaaacttaatccctgctgaggttatttcagcaatcatcaacggtacagaagaattaatcaacgaactaaaatcgtttggagtaaccattcattcaacaggaggagaaactgccgatgttggtgatgttgtccgtactattattgtagattctactgtaacagcccgtatgaagcgcagcgatgtggtagataatgccaacataaaagcaggtgatgtaattgttggtttggcttcttttgggcaggcaacttacgagaaaagctataacgggggaatgggaagtaacggattaacctctgcccgtcacgatgtttttggaaaatacctggcagcaaaatacccggagagttatgatgcagcagtgcccgaagaattaatctattcaggtcaggtaaatttaaccgatgctgtcgaaaacagtccaataaatgcaggacagctggtactttcgccaaccagaacgtatgcaccaattatcaagaaaatcttagatacctatacaccagctgatattcacggaatggtacattgcagtggaggagctcagacaaagattttacatttcgttcagaacttacacattataaaagacaatttatttccggttccgccattgttccaattaattcaggagcaatctaaaaccgattggaaagaaatgtatcaggttttcaattgcggtcaccgtatggagctttatgttcccgaaaatattgcacaagatattattgcaatttcaaaatcattcaatgtcgacgcacaaatcgtgggtagagtagaagcagcagacactaaaaagcttaccattaccagcgagtacggaacattcgaatattaatattttttgagttacaaaagttcaaaggttctgagtggcaaaggtttctataccggagtttacaacagaacctttttttattaatcattagcttttttaggagctaatcccgctattcgttataatcttttgtgccgaaccccgtcacaaaaggattttcactgctatcggggctaaaaaaaacatcaagctatgtatgaattacttttttggagatatttagaagaggtttatctgaaccatcatgaagtttatgaggcccttgtggaaaaagaagaagtagacggtcttgcaatacttcctgttgaggtcattatcaacagaatcaattccgttttttcccaatgggagcgagtggacgaaaacagctggaaaaacagcacaggaaaaggggctttccaggtaattacaacaccacaaagtatcaaaattgattgttatggaaccgaaggaaaaaccatgaatacactggtttccctgatggaagaattcaaatgtccgttatacgacccgcaagttcccgagcgttatgacgaaatgaatgaataaaccatcatttcctataatactctgcgaatctctgtgcaaaacttagtgtctctctgtgaaatagtttttagataaagtagatagaaaactttatagtgagcagctcaaaaaatgaattcatgaccacatcaaattttaatttttccgatactataattttagaagacgattctgttttattacgtcctttgcaagaatcagatgccgataatttattggaaatctctgttaacgaacccgaaacctggaaatactccttagtaggtgcagatggaaaagaaaatctgatcaactatatccaactggcggtaaaagggcgagaaaatcaaaaagaatttccgtttatagttttcgataaaaaaacacaaaaatatgcaggttcaacccgtttctacgacatgaatctggagtataaatcactgcagctgggatatacctggtacggatcggcttttagaggaaccgggcttaacaaacattgtaaattcttattactgcaatttgcctttgaaacccttggtgtggaacgtgtagaatttcgtgccgataataataatgaacgcagtatcgccgccatgaaaagtatcggatgtaaggttgaaggtgtcttacgcagtcatatgcctactgccaatagtgatatacgtcgcgattctattgtgttgagcatcctgcaaaacgaatggtttgatgaggtaaaggaaaatctaaagcgtaagctttaaaaagaggcgctagcctcgacccatattgtagggccggattttaatccggtttaaacgtcgcaagagcaaaagaagaaccatcagttcggtccattttacaaactcatcgcaaacgtataatttgtttttaaaaaataccgtcattgtaatatgtgtcgttcctacggaactcttgaacgtgtcgtatgattttttcaacggatcgaaatccgttgctataaataggtcgttccttcggaactcttgaacgtgttgtatgattttttcaacggattgaaatccattgctataaatatgtcgttccttcggaactcttgaacgtgttgtatgattttttcaacggattgaaatccgttgccataaatatgttgttcctacgggactcttgaacgtgttgtatgattttttcaacggatcgaaatccgttgctataaatatgtcgttccttcggaactcttgaacgtgtcgtgtattttttcaacggattgaaaaccattgctataaatatgtcgttccttcggaactcttgaacgtgttgtatgatttttnnnnnnnnnnnnnnnnnnnnnnnnnnnnnnnnnnnnnnnnnnnnnnnnnnnnnnnnnnnnnnnnnnnnnnnnnnnnnnnnnnnnnnnnnnnnnnnnnnncattgctataaatatgtcgttccttcggaactcttgaacgtgttgtatgattttttcaacggatcgaaatccgttgctataaatatgtcgttccttcggaactcttgaacgtgttgtatgattttttcaacggatcgaaatccattgctgtaaataggtcgttccttcggaactcttaaacacaactcgcaactcataacccataattcataactcataacttcctacttattatccgtctttcaaaagtaaattctgctcctttcttaacctttcaactaatgaattaagataggtttttgtttttagaggaagtaaattccaggttgaatcttttttaaaacttctgcaataatccagatcgcattctacggcacgaattgcatattttttgttttggtagatcgtaataattttaacgcgccttatctcgttgtattccgttctcgtaccgtaaacaatcaccggatcgataagcccatctccgtcaagatcggtggtgctgcagtattttgtccaaaaagagatagtagtttctttaggatcactgtcttctagtaaatcattaatcctccatttttcaagaaaaccgccatgatcattcagcgtataaatggcctgtatcttcgtgtttaaggtgtctttttttgaaatcgttttttgattttcgcagagaagtaattcatacacaccgcttttatcagaacactcgactgctttgtagattggaaattccgaaacaccgacaagttctctttgagcgatttctttttgggtgagtttatgactttctgttttttgcgcaaaaccaaatgtggtataaaaaaagatgcagaataaaatagagcttttcataaatagtgtgatgttttatagaaccaaagatatttaaaagcttttgagatcagatcaatttatattttttaaaaagcatattttgttgtatttttcgaatctgaaagtattggtaaatcgatttagtagagtgccaaatgctgtttttaagtaaaaagtaatgattaaaagaaaactaatgaatagaataaattgtaaaaattttgtttttggattatcctttttaatattcggttataccgctaatgctcagaaaaaaacaattgagaaacgagatttgattcagtatgttgatcctatgattggtaccgccaaaatgggccatacctatccgggagcaacagttccgtttggaagtgtacagttaagtcctgaaaccgatacaattgcctacagtacaaatggaaaatacaatggagaggtttacaagtattgtgccggatatcaatacgaagataaaacgatcgtaggttttagtcatacgcattttagcggaactggacattctgatttgggcgactttttaattatgcctacaaccggaaagctacagctaaatcccggtgttgcttcaaaaccattgtccggttatcgatcggcattttctcatactaccgaaaaagcagagcccgcttactacagtgtacttttggaagatcataagatcaaagccgaacttacggcgacaacccgcgtaggaatgcatcaatatacctttccaaaatccgaggatgcacatatcattttagatttgacttcgggaatttacaattacgataaaaagaatgtatggacttttgttcgggtagaaaacgatactttgattaccggatatcgtcagaccaacggctgggcacgaaccagaaccgtatattttgcgatgagttttagtaaacctattaaaaattacggacaggctccagtggagaaaagtgtgtacagaggcttttggggaagatttgatcaaaccaaaaactttcctgaaatggcgggtcagaatttaaaattgttctttgattttgacacggaagaaggagagaaaattaaaatcaaaatggctctgtctcctgtgagttctgccggggcagttgagaacatgaaaaaagaagttccgggttgggatttcgaaaaagtaaaaaaacaaagccaggaagtctggaataacgagttgaacaaaattcaggtagaaacccttcagaaagaagatttagtgaatttttatactgccatgtaccatgcctttttaggtcctacagaatacatcgatttagacgggaactacaaaggtttggatatgaacgtacataaagccgaaaactttaaaaattataccagttactccttatgggatacttatcgcgctttgcatccattattcaatatagtacagccttcccgaaattcggatatgatcagttctatgttggcgcactccgatcaaagtgtgcacaagatgctgccaatttggtcgcattatgccaatgaaaactggtgcatgatcgggtatcattccgtttctgtaattgccgatgccattgtaaaaggcaatatcaatttcgatcctgaaaaagcacttgaagcttgtgtgaaaaccgcaaaagtgccttattatgacggattggaatattatatgacaaaaggttatgttccggaagataaaaatggtgcttcggtttcaaaaacactcgaatatgcttatgatgactgggcgattgcacaggctgcaaagaaattaggtaaaacggaaatctataatgaatttatctcaagatctaaaaattataaaaacgtttacgatgcgcaaacggggttcatgcgtccgaagttaaatgacggaactttcaagaaagaatttgatccgttagatacacatggtcaggggttcattgaaggaaattcgtggaattacagtttgtatgttccgcaggatcctgctgatatgattcaaatgatgggaggaaatgaaaaatttaaagttcgattggattccttattcaacatgcatttgccggataaatattttgaaaacacggaagacatcaccagagatggaatcattgggaattatgttcatggaaacgaaccttcgcaccatgtcgtttatttatacaactggaccaattcaccgtggaaagctcaggacaaaattagaatgatccttaaaaaaatgtaccgaaacggagctgacggtttaggaggaaatgatgattttggacaaatgagtgcctggtatatttttagcagtttaggtttttaccctgtagcaccgggttctgacgaatatgcattaggaagcccgttagtgaaaaaggctacttttaatttggaaagcggaaagaaattcgaagtagaaaccatcaatcaatccgataaaaatgtgtttgtgagcaaggtaattttgaatggaaaacaattagataagccttttctgaaacatgctgatgtggtaaacggaggcaagatcacattttatatgagcgctaaaccgaataagagttattagttatgagttatgagttgtattgattaacattgtctggctgagcgaagtcgaagcctgacttaccaaaaaaaagaacttgaaaaagtgtaaggtttaaatttgagaaaatttgtgtaattaatagcgaaacaacaaaaaacttcccgaaatttgcactttaaataaaagtaaacatgaagataaatctaaaatcaggaattgaaaaattgcttttcggaatgaagcagaacgatgttacagctgctttaggaaagcctgataaaaattataaagatgaagatgacaatgtgatttttgtatacaatgcacaaaagatcagattgacgttttatcaggaagaagacttgaaattaggttatttagtagcttcaagcagcgatttggaagtttttggattcaaattaatcggaagaaaaattgctgatgtaaagaaagatttagcaacaaaaggaattacaaaatacaatcaggaaacttttgatactttcgagaattactttaatgaagacaactggttcatccttcaaacagaatttgacgaagtagtgaagtttgaagtcggtgcgatcattaacgataaagatgaatttgactggaaatttccagtaaagaagaagtagttaaaaagatttataacctaaagggtaaacaggtgtcacactgagcgatgttaccgttttagtctgttagatcaaataataattataaaaaaaaccgacaatctcttgtcggttttttttgtgtttgagtcgaaaagaactatcctttcaaccatgcattttttagtttttctttggaagcgtctgttgctttaaaagtctctttttcttcaaacggaatttttacagttcctttgatcgtttgctcaacaccggcacgttttattttaatcgtaattggatcattttccttccagttatcactttcaccaatcaaatcataaatgttgtcgaaattgtatgctttatcgtttacggcaagaatgatatcgcctcctttaagatttaaattagtaaaaaacacattcaagtcgatattagaacgaatatttatggcttttgtagctttgtcaactccaatataaggtgcttgacctttaatgaaaactggtgccggagctttttcagaagctttggccacgccaacttttgctaaataaaagtcatatggaataggagtggttcctgccacatatttgtttaagaattcaccaacctcaggataagtcaattcagttactttagcaaaaagttcgttatcgttaaatggtttttcaataccatattcattcgataatttgtgcattaaatccagaattcctctttctccattgcttttttctctgatgatgatgtcaatacacattccaattaaagctcctttttgatatacatttaagtattgatctttatatggctgatccagtacatttttactcattacggtaaatgacatggtatcgtttaagccttttgcgtgttcgattttatcagcaatacgggtgtaaaattcagattcgttaattaggccctgattgatttgaaacaggttagcaaaatattctgttactccttcgtacatccataaatgctccgacatttttggggcattgtaatcaaaaaactgaatttctttagagtgaatggttaacggagttacgatgtgaaaaaattcatgcgaaactacatctttcattgattctaccagtttttctttaggcatagattccggtaaaacaactgttgtagcggttggatgttccaatgctccaaaaccgtgggcatcatccttagccatacttgacagatacaaaagaacagtatactttttgttagcatttactttgcctaaaaagtttttctgcgctgtcatcatcgtcttcatttcaggagtgatgctttcggctgtaaactttccggttggagaataaacggcgattaaaatatccattccatttacgttgaaagtcgtataatcaggtttagagtacatgatcggattttcgactaaaacagcatagcgggaagtggtaaaaacgtcacttgttttgcttgcatcttcgtctgtcattgaagtggctccccaaagtgtttcaggatgtgttactgtaactttatacggaatttctagtttatcctgaaagtaacctacaaaaccgtgtgtgttaactaagaaattaacgcccgcattgatatttgttccggcaggagaaaatacgtcatcatttccaaatcccgttcctttttcagtatcaaaagtatctcctacccaataggttactttttttaatttttttgcatctgaaatagaccaggagttgtcatcaattctttttaccgttaattcatttcctttggcatcaaaggctttaaaatcacctgaaaatttaccgtaattatctgtagaataagttcccggaaccgtttttgggatgctgtaaattacttcgtcagtttttatttgcggaggggttaccgttaccagaactttgtcgtcttttacatcaacaagattaatgtttacgtctacaacattgttttttgcggtactggaggaactcccggttttacagctccaaagtgtaactgccagagctagggtgtaaagtatttttttcatttcttcatatttggttattgctatttgactcgcaaaaggtaaaaaagttacatttcggttaaaaataaaaaaaaactcctggatttcaggagttctatcttaatctagtttgttttttatataatatttgccatccaaatcttcgtcaaaatcatctattttaactggctttggttttggtttatttgcaatggccttttttttccacatctcaaatttctcaaggggcattttcttcttcatgatttccagaatttctttttctgccaatccaaattccttttttatgatttcaaatggatttttttcttctaaggctaacgaaacaattttttcagtttgttcccaattcaattctttgcggttactctttttcatcacgtgaaaattaattcaaaatagaggttaatgattaatagattgattttcaatttaagtatcaatattaataaaaaaaataattagttggttcgatgaatgctgttttttttaatgattttaactgttttttgctgatctcgatttttgaaacggtatttttaatagatttttcaaattgttgttttcttcaacagccatgtgggtatctacgccatagattattttgtctttgggtaaagtggtgaaagtaccaaacagacgatcccaaaccgaaaaaatgttgccataattactgtctgtatacggcagaacgtaatgatgatgtactttgtgcatattgggagaaacgataaaataactcagtaaagtgtctagtttttgaggcaatgatatattggcatgagtaaactgcgtagaaataacagacaaggtttggtatagaaaaaccatccacattgggcttccgatgattaaaaccccaagggttgtaaagataaatcggatgatgctttcgccggggtgatgccgatttgcagatgtagtgtcaatccaggtatcggtgtgatgtacaagatgaaaacgccataaaaatttgaacctgtgctgtacataatgaggagtatacgcaccaattaaatccaacaagagcaaaccgatgatggtgtaaagccaaagtggtaaagcaggtaaccattgcagcagtccaaagtggttttcaacggtccagtttacagttttaattaaaataaaagccaaaacaaaattgacaattatggtagtgaaagtcaggaaaaaattgattccggcatgctgccattttcgatagtgcatctggaaaagaggaaaggtattttcgatcatccaaaaaaaggtaattcctccaaccagaattaagcttctgtgtgaagacggaattgtactgaaataggcaataatatcattcataaggttgtattagagtgatacaaaataagggggattcagattgttgaagcatacgaataaatgtaagttcttccgaaaaaagaaaagagaaaaccgaatagaagtatatttgattttctcttttatgatagttataagcaaagatttatgctttcttgattaagctgataatgaacagtaaaacccaggctcctccaacagcaattataatttgccaaagaagtccgccaccaccgatacctaatttaccggcaatccagccaccaataataccgccaacaattcctacgacgatattacccaataatccaaaacctgcacctttccagatctgacctgcaagccatcctgatatggcaccaataagtaaaaaatataaaaattccatatgataattttttgaggttaaagagagttgattaagcttcggcgtgattttgcagtaaggttttataaatgaaacctgctacaatagcacccagaatcggagctgcccaaaacagccagacttgagaaagcggctctccaccaacaaaaatggcctgagataatgatcttgcaggatttacagaagtattggtaattggaatactgattaggtgtattaaggttagagcaaaaccaattgcaacacccgcaaatcttccgttggcaaatttatctgtagctcctaaaattactaataagaaaaacaatgttagtacaaactcagcgataaaagcagattgcaaggaatatccgtcaggggagaaggctccaaaaccattagaagcaaaagctcccgctttggtattatcaatggcaaaacctgcttttcctgatgcaatggtgaataaagttcctgcggctgcaagagcaccaacgcattgtgcaactatgtaaggaattaagtcttttgcaggaaatctgccgcctgcccataaaccaaatgaaacagccggattaaagtggcctcctgaaatatgtcctacggcataagccattgtaagtacggttaaaccaaaagccagtgcaacacctgcaaatccgattcctaagtcaggaattccggctgcgaaaattgcgcttccgcaacctccaaaaaccagccaaaaagttccaaaaaactctgcaaataattttttcataataaatagttttaattaatagttgattgttaaaaagtatattggtatgcccaaaaaatcaagacaatctgaatgggcaagcgtagaaacaaaatccacttgggtaaaccaaaacttgcttttttattctgatacatataaagattggaagggaatacagcaattaaagtagctataattccccatgcaccaaaatgagaggtaacaggaatcaggaggagtatgccgaagataacttcggcaacaccacttaaaatatttattaatttaggatttgaaaaaaatgaaggaatgatctttaagtacattcccggttttctgaaatgatttaatccggcaataatatagagcgaagccattaaatacaaatgccagggtaaattcatgataaataggattgtttatcacgaatttataaaaaaattaacaattattgcactacaagaggcttttttttagagtgtttctaaattaactgttcttgcgtttgaaatttacattcataataacaatggctaaaatgattagaataattccaatccattgtgaaagaattacttcttcatttaataaaacgtaggccatggttaccgaaactggcagttcaagggcagaaacaatacttccaagaccaattcctgttaatggaaatccaagattcattaacatcggaggaataatagttccgaataaagccaatacaattccccattttgcaaaaatagcaagattaaaaggagtaacctgtgtcgccaaggcaaatgaaaatacgataatggcacctccaaacagcatgtacaaactacgttgtgccgacgagatttctgtcgcaacgcgattagcggtaaacatagtagtggtaaaagaagcagcggctaacattccccaaacaagtcctctccagtccagttcgatttcgttgtgtaaaatattagtggctaaaacagtacctataagaacgataaataccgaaaagaccttttgcttggaaggtaatttcttttctaagatcatttcgagtaaaactcctatccagactgtttgcattagtaaaacgataccaattgaaacagggatatattttacagccaaataataaaacaaactcgtcattcctaatgaagtaccggcaagcattaagctgaatatgttttttggagttgctttcacaacattgtttttatgttttagtttttggaacgtattgattagtaaaataccaatgattcctaatacaaattgagaggtagttacttcggcagtagtatatccttctgtgtaggccatttttacgaaagtggctaacattccataagttgtagctcctaaggctactaaaaatactccttttaatacattgttttgtgacatcttaatctgtttattttaaaaaatttaagccggcaaaggtaagctattttgtttaggatttaatagaaaatattcagaaacgttgtgattgtgtttatttcgttcttttcgtgaggtttaaaattgaagatttgacaggatggtataaaataaaaaaccaccacaaaatatatcgtggtggttgattttaagtccggtaaggtactttgaattactttactggctgctctttataagtttcgatttcaaagattaaagtggcgtttggcggaattacacctccggcacctttttctccgtaagctagattagaaggaaggaagaatatagctttttctccatctgtcatcatgtctaaagcttcaataaaaccaggaatcattccgtcttttttgcctacaacaaaagggaatgctttgtatcctttttgggcatcacggttggcatcgtatttaccataagctttcgctacggtagagatactactgtcaaaaagatttccatcttcaaaatatcctgcatagtgaaagtaaatgttagatccgtcagctcctttaacgcctgttcctttttgtgtaacgacatattttaaaccggaagctgttgcagtagctttcgcttttgtagcggcaaaataagctgctttttcagtaatcactttttgagattctgctttttttacatcttgtttttttgcatcttccgcaagtacttttacagcatcaaattttttggctgcagcacctttgcgtgtaatggtaattttagtcataatatcgtcctgaacaattttattaacattgtccattcccgaaactacatgcccaaaaatagtatgtttaccgtttaaccacggtgtatctttatgtgtgatgaaaaactgacttccgtttgtagcaggacctgaattcgccattgctaaaactccgcccttttcaaatttcaattctggtacaaattcgtctttaaatgcatatccgggacctcctgtaccatttccgtcaggatctccaccctgaatcatgaaatcattgattactcggtgaaatttcaatccgtcgtaaaagggtttacctttaagtttttccactttaacgtttgggttcgtgccttctgccaacgagataaagttagccacagttaccggtgtttttacatattctaaagaaactacaatatctccttttgtggtggctattgtagcaaaaatgccttcgccaggattggttttaggggctatttttgctgctgtagctgctgtttttggctttggtttggctactggttttttggtagcctgagcctgaatatttacaactgccaggcaaaataaaaatagaaatttaaacttcatgatgttccgaatttaagtctataatgttttttaaaaatgaattattgaggtttttctaataattgaatttcgaaaataatattagcatttggaggaattactccgccggcaccggttgctccgtaagccagatgtgcaggaataaaaagtactgctttgtctccaaaagaaagttgctcaattccttcaataaaaccgggaatcattccgtctttacggcctgcctggaaaggaattggctggtatccgtgtgcttcggctcttgcagcatcaaattttccgaaagctttattaacttcttctacgcttgaatcaaataaagtaccgtcttctaaaaagcccgaataattgatgtacaactgagctcctgtagctggttttttacctgttcctttttcagtgattacaaattctagccctgaattggttttagtcgctttaggtttaatagaggctaaatacgctactttttctttttgtacaccagcgtatttccctttttccttagcaatttcagagaaataatcgtgaaatacttttatggcatcaaactttttggcagcttcaccgtttcggataatttttaccgaaacaattttgtcgtcttgtttgatctgatttaccacttcctgtcctttttcaaccacatgaccaaaaatagtgtgttttccgtctaaccatggagtctcaacatgtgtgatgaagaactgactgctgtttgtagccggaccattgtttgccattgctaaaacaccagctttgtcaaattttaaatcggtgatctcatctttaaatcggtatcctgcatcaccagaaccagttccttcaggatctccggtctgaatcataaaattttcaataactctgtgaaatttcaatccgtcgtaaaaaggttttccttttaggtaatctttagtaacaaactcgcttttaccttcggctaaagttacaaaattagctactgtaacaggtgcttttttataatccaattcaacaataatgtgtcctttattggtttcaatatccgcatataaaccatcaggcaggttgctgtgttcgtctttacaagagaataatgaactaacggcaagtaatactagtagaatactttttttcatttttaaaaggttgtttttatgggtttaaggtatcttttttagcttgggttacagttttaggagctgttgttttaggggtttgtgtagctgtagttgttggattagcagctggatccggtacaaagttacgaagtgtaacagtacacattaaggattgattggggcctatttttttattgtctccatgatatccgtaggcgatatgcgaagggaataagaaagtcacggtttcgtttttatgcatcatttttataccgtcacgcaatcccatcataatgtcttgcttgtctacataataggtttgcggacccagatcggcttcagaatagattattttgccattgatatcttttatttccagattaaaataagcgatatctccttttttaggagtctgaagatcagtttcatttcgttcgtcataatacagccagtatccttttcgggtggcatagtattttgttttcggattgcttttgattatttttttgataacatcctcttcattggctactaattttttatttcgatcggctgattttttcataaaagtaccggaggcctgagaaataggtcttctggcatcttcatgttgtttacagctaaccaataaaacagcaaaaagtagggcgcaactgcttcgttttaagtagttcatatttgggttatatttctagtttgtttactaaatcttcaaattttttcaaagtttcttccattgaggtctctgattttcctcccgctgcattactgtgtccgccgccattaaaatgatctcttgcaaactggtttacatcaaatcctccttgtgaacggaaagagattttaatgattttttcgtctttattttcgataaaaatagcagtaaaaacaataccttttatacttaatccgtaattaacaataccttctgtgtcgccttttacataatggaatgcgtccagttcgtcctgagtaagcgaagtataagaggttttgtgttcttccagaactttcatgttttgtaacgcacgtcctaacaattgcaaacggctgtaagaactgttgtcaaacaacaaaacgggtatctgagtattttcgacacctaaatcgattagttcagcaatgatacggtgtgtatttcctgttgttcccggaaagcggaacgagccggaatccgttaatattcctgtgtagatacaagtggcgatggttttgtctaaatcttcttttttgcctaagaaagaaataaaattatagaccatttcacaggtagatccaaacgaagtgtcagagtacgtataaagtgcataatcatccggtttctgatgatggtcaatcataataaacggagcggttagcttcacaagagtatgttccatctcacctgtacgatgaaaagcattaaaatccagtgtaaaaataagctcagcttcttctaatattttggtacagttttcagtatctttttcaaatattttaaccgtttcagaacctggaagccaggctaaaaagttaggaaaatcattaggagcaattactgttggctgatgattgttttttaacaaaaaatggtataaccctaaggttgaacccatagcatcaccgtcaggtcctctatgaggaatgatggcaattttctttggggttgcgagtaataactgtatcgcttgaatgtcttgtattttcatagtgtgcgaatttacatttttttaatgtaatgctgaaatcattttttataagttaattgtgctgagttcaaagtccaaagtccaaagtcgaaagcctaaagcttatagcttatagcgtactagaggttttccagttcttttcgctgtagtctctgatacaacttatacttagctccttttataatttgtgatttgtaaattccaacagaaccggaggagaaataagctataaggcaggcaatagcgatgaataatccgggttgaactccaaaaagttccattcccatgatggtacaggcaataggagtgtgtgtggctcctgaaaacactgctacaaatcctaaacccgctaaaaaagcaatgggtaatggaatcaccagagacaaagcactccctaaagtagcccctacaaagaacaatggagttacttcgccacctttaaatcctgctccgagagtaaatccggtgaatagaattttaagcaggaaatcgtaccacggattagcatttgtaaaagaatcgacaattaccggaactcccagtccggagaattttgtgagtccgaaacctgcaaggacaatagacaaaacaattccgccaataaaaggacgtaaggggggatatttgatgtttttggagaaaagcgaaccccagaaatgggtgcttctcgagaaaagcagagccgcaaaaccggataagagaccaattaaaattacataacataaagtggttaggctaatttcaggaacaaccggaatgttgtaatgggtatgttttacctgccagaattcaacggtgaaataagcagcataggcaaccaaaaaagagagaaggatgcttttgatattaatttgactgaaatacaaaacctccaaggcaaaaatggcacctgcaagcggagtcccaaaaacagaagcgaaaccggcactgatgccgaggataatgaggactctgcgttcggtattatctaaattgaaaagtttagtaaattgatcggcgatagcaccgcccatttgtactgctgtgccttcacgtcctgcagaacctccaaataaatgcgtcagtaaggttcctaaaagcacgagaggagccattttaaaaggaatgactttttttggggtttcgtattcttcgagtaataaattattgccttttacaacagattctccccaataatgataactaaatccaacaagtaatccgccaagaggtaaaagccagattagccagtcgtgctgaattctaaattgcgtaacccattccagtgaaagtaagaaaaatgcagaagcagatccggacaaaacacctattagaacacaaatgagaatccatttgaaaatagtaagcagtgttttttttaggttttgaaaagccattaataaactaagttttttagccacgaattcaagaataaaacgaattttaattgagacaaaaataatcttttttaatccttaatctgtggctaaataaaaatcgtgaattcgggactaaaaaattattgtacaacagctgtaaattcaatttcaactagatattcaggagcaaccagtttactgatttcatagaaccctgttgttggttttacatctttaaaaaaggaggaatgcgctcttgctacctcttcgaaagtcgaaatatcagtagtaaaaattcgcgttctgatcacatctttcattccaacatttaaatcttctaaaactttttcaacacgttccaggatgttgtaagtttgtgcataagcatcattagcttttattttttcaccatcaacaatagctacagttcctgaaacttcaatgatgttgccaattcttacagcacggcaatatcccattttgtcttcccaaggagatcctgttaagatgttttctcttttcatttcttttggtttattgaatttacttctttgtttttaaggtaaattcggattggttaatagagtcgcaatttataaaatatgcaatgaaaaagagtacgattgaattgaaatcatttcggaattccttcttttttgtgatattttaaagcgtcaaattgttttttactcgatttgatgctgttcgtaaagacgaagtttattttgggtagcagtaaggttttgctgaagctcttctattttgcctaatagatttgcaatgacatccaagccttcgagattaattttcaaatcataatgtaggcgtatcattttttcaacagttggcaattgttccggttggaaatattcgtcctcttcaagtagtataattttgactaaaccgtaattatgcaactccgttataaaggtgttctcaatttcgtgatacacacaaaattgtttgatatggattaagtttttattgctcatgatttcttagtttagctagttcttcaaataattctttttctttggcagacagttgggttggaatttttatagtgtaggtaatgtataaatcaccaaactgattctcttttttgtataccggaaagcctttgccttttaattttactttagttccgggctgagtttcggctgggacttttatttttacttttccgtcaaaagtctttacaaaaatttctcctcctaaaatagcggtgtataaatccagttcaacatcggcatataaattatggccttcccgcttaaaatcggaatcattatcaattaagaaagtgatgtataaatcgccatttggaccaccatttgcaccgggtgcaccatgatttggaattttgataatctgtccgttttcgactccggccggaatggtgattcggatattttttccgttaacacttagattctgtttgtgagtcgtgtaagcggatgctaaatctaactgtaattcggcattaaaatcctgacctctgtattttgcctgacctctggagcttcttcctgaagaaccgtacatagaattgaagaaatcagagaaatcactttcggaaaagttttcgccaccaaaatcagtgtagccttgattgccttgttgttgtcgggaatattgctgttggttaggatcgtaacctgctttttcaaattcatcggcatgtttccagtctttcccgtatttgtcgtattttttacgattctcgggattgcttaagacttcgttggcctcatttatttctttgaattttctttccgcttccttgtcattggggtttaaatcaggatggtattttcgtgccagttttcgatatgcctttttgatttcagcttcagttgcagactttgtgatttctaatactttgtaataatcaatataatccatggattgaaaatttaataaattagctattttatcaggtatttataaagagataagagtatgttttataagtgtcattgtttttaacacatagagacatagattttctttctgaaaaaaagacgttccattttaaataaaacgcagagccccatgggaaagaaatagatttctctcagacattttttcctgcgcataaaaaattatgttttcatgtgttgattttttttgcagaaggtgatctttagtgctgcttttaaaaagattgaagttaggaataagttgctaattatcaaaacgatgtttttcgaatattaaaaaaataacatttacatagtttcagaagccctcgattgatttggaatttgaagttttaaaattgaaattaatctcatcagatttgcagtttttggcaggttttttgattccaaaaaaaggcataatatagtgttataaaagtcttaaagttgtagtgcttaactatattatgctatttttgtgattccagatcctgattttaaagcaaatataaaagccgattcgataatactttttcaatgaaacacattttattcttcatattattttttactgctgttaccgtatcggcacaaaaggaatttggaactaaattcaagcctattgcggcacctaaatttggagcaaaacccaaaaagactccaattccggaaataaaagatcctcagggtgaaaatctggatatgccaggaattaaaacgcctaatgtttttgataataccagtattactccaaaatctcaatttcagattggggcagagaaaagtaagttcaccatgtctaccgaaactgattttgccaatccgggagatcgttacgtgcctaaaatggagaaagatttagacaaagctttaagagatgcgggtttgaaagaaggacgcggaacgttgataaaaagaaatatctctttgggagattttagaacaaaatcgcaatatttcatcataaaattaagagactttggagccattgatggcgatttggtcaaagtttcatcaaatgatgccgtaatcgccagtcagatactactggggcccaattttaaagaagtaaaaataaacctcgcagcagggtttaataaattagattttgaagctttaaatattggtacattgggcggaaacactgcagaaatccaagtctatgatgataaaggacaattagtaaccaatgattactgggataaccttgccgctggatttaaggcttcgattgttgtgacaaaagaatagctttttaaggtgctaagaggctgagatgctaaggttctaagtttttcaaaaaatgataattagtgatcattgggataaccttgcaatagttttttttaagatactaaggggctgagatgctaaggttctaagttttttaatatatgataattacatgaatattggggtaaccttactacagttttttaagatactaaggggctgagatgctaaggttctaagttttttaatatatgatgactacgtgatcattgggataaccttgccgctggatttaaggcttcgattgttgtgacgaaagagtgatttttttaagatactaaggggctgagatgttaaggttctaagtttcctaaaaagtggtaactgcttgattattgggtgagcatgtgatagtttttttgaggtgttaggagatcaaaaaaacaaaggctctaagtctttcgaaaaaaaacttagaaccttagtgtctcattatctcacttatctcattatctcagtatctcagtatctcagtatctcagaacctttcctagaacggatccgcagtcactctaaacttcatttctgcttttacggttacatctttagtaagtgtttctttcaaagtaacttttgttctgattttgtatttatctgctttaatgtactggtccagtcttgcatcggtacaaatcaaatcgatgctgttggcagaggaattgatgttatcctgatacgcaagttcgatttcatcagaatctgtcgtagagatatacaaatgaaccgattttaaaaacgtaaaggttttatcggttggatttgtgatcattagtttaagggatttcagtttaacatcttttactaaactggctttggttttgttgttctcaaactcggcagaagaatttgtagtgacatcgggagtgataatttccgaaggcagattgataggagaagtactctttatctgaatagaagtttcgtttgaaatcgtaaaagtcaataaattatcgacagcatcacaagagcttaaaaacaaagacaaaaagagagaaagggcaattaattttgatttcatagttaaattttaatttgggtttttcgttacatacgaaataaattggtttttggattttttgtgctgagattctaagatactaaggttctgaggtactaagttgtaaagatgttgagtttttatttttatggtaaaaatgagccttagaatcttagtaactcagcaccttagaacctttaaagaaaaaaaaatcaaaattccatttttcaaattcgaatataaaaagtacttttgcgcatgcaacacaacgtacttattttagatttcggatcgcaatatactcagcttattgcgcgtagagttcgcgaattaaatatattctgcgaaatttttccttacaatcactttcctagtgatttatcaccttataaagccgtaattttaggaggaagtcctttttctgttcgtgcagaagatgctccacatcctgatttatctcaaattcgaggcaagcttccaatgttagcagtttgttacggagcacaatacttagctcattttagtggaggtgaagtagcagcttcgaacaccagagaatatggaagagctaatttgtcttatattaaagagaatgaagttttcttcaacggagtttctgaaaacagccaggtttggatgagccatagtgatagtatcaaagctttaccaactaatgctgtaaaattagcaagcacacatgatgtagaatttgctgcttataaaattgaaggtgaaactacttatgctattcagtaccatcctgaagtttttcattctactgaaggatcaaaaatgctgaaaaactttttagtagatattgctgatgttcctcaaaactttacaccaggagctttcgtagaagaaatggtagcggagttaaaagagaaattaggaaatgataaagtggttttaggattgtcaggaggagtagattctactgttgcggcagtgctattaaacaaagcaattggacaaaatttatattgcgtttttgttaataatggacttttgcgtaaaaacgaattcgaaaatgtattggatcaatacaaaggaatgggattgaacgtaaaaggagtagatgcaggcgatcgttttctgtcagaattagcaggaatcagtgatcctgaaaccaaacgtaaaacaattggacgtgtatttatcgaagtttttgatgatgaatcacacctaatcgaagatgtaaaatggctggcacagggaactatttatcctgatgtaattgagtcagtttcggtaaaaggaccatcggcaacgatcaagtcgcaccataacgtaggtggattgccggattatatgaaattacagattgtagagccgcttcgaatgctgttcaaagacgaagttcgaagagtaggagctactttaggaatagatcctgagttattaggaagacaccctttcccgggaccaggattatcaattagaattttaggagacattactccggaaaaagttcagattttacaagatgtggatgccgtttttattgacggattaaaatcttggggattgtatgataaagtttggcaggcaggagcaatcttgcttccggtaaacagtgttggtgtaatgggcgatgagcgtacttacgaaaaagtagtagcgcttagagctgtagaatcaacagatggtatgacggcagactgggttcatttaccgtatgatttcttaatgaaagtgtctaacgatattatcaataaagtaaaaggcgtgaatcgtgtggtttacgatatcagctcaaaaccaccagcaacaattgagtgggaatagtactattttttaaaattaaggcgttacatttgtaacgccttaattttttaaacctactatttatgagagaatttttaacgatttctcttgtgtttgttttgtcttttaacaaaataactgcgcaagattcaattattgagcatcggattcaaaagggggaaactgcttactttattgcccaaaagtacaaggtttcggtagaagaaatttacaaactcaaccccgaatcacaaaacggaatcaaggacgatcagctgatcaagattcctgtccgttcctctgaaaaaccaaattccagtcagcagattactcatactgttggcgcaaaagaaactctttttggtttagcaaaacagtataacatttcggtggaagttcttcagaatgccaatcaggcgattctttccaacggacttcagattggtcagcaactaattattccgcaaggttccggagacctttctcaaaatgaaagtacaatttcttcaaaagtcagccatcaggttgtggcaaaagaatccttgtttagtattgcgagacagtataatgtttcggttttggatttggaaaacgggaataaaaatattcttcaaaatggattacaagttggacagactattgcgattccgaataaacgaaaaactttagacggacgagttcgtgtcatcaatcaggaaactgtttttcatgtggtcgagcctaaagaaacgaagttttcgatcgctaaaaaatatggaatttcgattgatcagctggaatcgcagaatcctgaaatcgtaaacggactgattgttggaaataagctggccattaatacaaaaggtgtaaagccaacaaatgaaagcgaagaactgatgattgctctggccgaaaaacaggtagtggtggaaaaaacaaaagccaaaacagtggaattggaagatttgaaagaccgtttggttgttcagaaagaaatgaatcagaaaattataaaaattaatgatttgaaaatcaatctgaatgatatgaatggctcaaaagaaaattcagttgaaaaattgcgattggtactggaagcgaataaaaatgtgcaggatgttttaatggcgaaactggattcgctggttcgtactatgaatgatgatctggtcgatttgaaaagattagatattttaaatgttgacgaatcaaaaagactggaaaaacagtcttacgaaagtattggaaaaacgaatgaattatcgtctcagttaaaaaaagagttggcagaaaaccgaaaagtatatgccggtttaatgcataaagtcgaaaaaatcgctgtagccgaaaaccaggagtacaagaaaaaaatccgcgaaagcgaaaaaaataataatccggtttccttacagcaacgtctttcacttgaagaaataaagcagtacaaaatagagcaggagcagggtgatgcaaagaatcagctcttgattgccaaaattgactcactggataatcagaagaagatcgaagtgaagagacatattagtaaagcatcttactatagcatggaagcccgaaattttgatgataaagtggccttgctgaaattgaaaaagtatcaggatcaggcgattaaaaatcagaaaaaaaacggattcattggcgattcaaaaatgatctcatcggaagaaatgaaacaggagttaaaggaaaatccgcttaaaagggacaaaacgataaaggtggaagtttttgataatcttcgcggagtttcaaacggctattacttagttttaggtatatttacagacgcaacgctaagggataagcttattatgaaactcattgattccggcgattttaacgccagtttcttttttaatattaatagtctttcgtactatgtgtactccgataagtaccaaaacatggaagaagcactatatcaatgcaagaaaaaagaggaagatgagttatataaagaggtgagtattgctaaggtcgagattgatcttagagaataagcaatgcagaaaaacaagtggcagggattttgttttacagagaattttgtaacttgtttttgaattaggaattaaattgttttaagctttattatgaaatattattcaacattattgtctctgattttttttgcaaccagttccgcattttcacaagaaaaggtggtgaagtacacggtttcaagcggagaaactattaaccagattgctgttaaatttaaggttacgccttatgatatttattctctgaatccggatgccagaaatggagttaaacccaataccgttttattaattccgacaagcggtgctaaaacagcagttaaaaatgatgttgctccggtgaaaagttcaaattcaggaaaaacaattacgcatgaagtacagccaaaagaaactttgtttggcattgagaaaaaatataatgttacggatgaagctttaaaagcagctaatccttttttggtgaaagacggtttgcagattggacaaactcttgaaatcccgtcaaaaggaagtgcggtgaaaacaactgttgcaacttcagcgaaaccgaagtcggcagcaccggaaaagtatgtttaccatgatgtggtggcaaaagaaactaagttttcaattgcaaaacaatatggaatgactgttgacgaattagaaaaacgaaatcctccaattgtttcgaacttaccggtagggtatcgtctgacaataaaaggaactgcccctaaagcagaaacttctgctccgcctgtgactgctgttgtaaaaccggctgaagcaaaaaaagcagtggaaacttcgaaaaaagcaacttcttatatggagtatcaggtgaaaccaaaagaaactttttatagtttaacgcatactttccatattactcaggaagaattaacggccttaaatccggcactttctgaaggtgtaaaagagggaatggttttaaaagttccggcaggatatgtggcaccaacaccaattatcgtacaccaacagcctgctgaaaaagaagttgaaaaaacgattgaaaagaccattgaaaagccaattgaaaagccaattgaaaatacaggaggaattaaagtggtagataaagtgaaatccgaaactgtttccgcgaatccggaagtggtggaactgactaaaaaaagaggggagaacgatcgtaaaaaactggttttattattgccattcaatttagcgaaaatgcagggggatacgatcagtgctgccagtcgaattaagagtgataaatttttgaatatgacgcttgatttttattcgggagctttgatggcaatcgattcggcaagaactttaaaactgccaattgatgttgccatttatgattctcaggaaacgaaaaatagttccaatgtttcaggtttaatggctcaaaataaattacaggatgccaatgccgtagtgggacctttctatcaaagtaatgccgaatctacggccaatacattgcgtttgtataatattcctgtgatttctccattatcaaaagacaaagctaacccaattgataatttgtatcaaacgatcccatcaaacgacgtggtgcgaaatgccgtttttgattatatgagagggaagaatggaaacatcgttgcggtggtagacaaaaagaaagaatcagtgatcagttacatcaaacaaaaccaaaaaggaattgtgtttgctaatctgactgaaaccggagctctggatgtggccaatttaaaaagtttgttattgcctaacagaatgaactatgtagttatggaatcggccaatacagcaatggttagaacgactataaaagctttgacagatgctcaaaaaacctgtcagatacagttggtagttttagagccaaacaatacactggattcggatgagattagttttgatagtttaattaagttgaaattgatgtatccgtcggttacccgtgatagtgacgaagcttctgttttgattttcgaaaaagagtaccgattgaaaaataaagtaaatccaaatacctatgctacaagaggatttgatgttacttttgatactatgatgcgtttggttcagggaaaaacctatcaggaaacagccgacttaatgacaacagaacaggttgataataaatttcaattttacaaaaaagaagatggaggacacgcaaacaaaggtgtttacatcttatattacgataatgatctaactttaaaagtagcaaattaatgacatcaaaagtaacctatttaggcgatttaagaacaaaatcaatccatgtgcaatccggaagtgaaatcatttcggatgccccggtagacaataacggaaaaggagaagctttttctcccacagatacggttgccaatgctttagcaagttgtatgatgacgattatggggataaaagcccgtgatcttaatgtaaatttagttgattcaactgccgaagtaacgaagattatgaacgcagaaccgagacgtataggagcgattgaaatcgcttttgaaatgaaaggggatgccgatgagaaaagcaaaaccattctggaacgcgctgcaatgacctgtccggtttttttaagtctgaaccctgaaattgaaaagaaaattacttttaactggaagtaatctgaaatttaaaagaccattaattacattgcccccaaaaaagtgaaacactatttgggggcatttttatggtgtgaaaagtaaaataatccccccttttttattgacttaaatataaatacccgacttgtttcgttgtaaaattatctttagcgacagatagaatataaaaataagttccgtcaggcagtctttcattttttaagaaaacattttggacattagcaaatccattaaaaacgttttcattggagccatattctcttgttcggaatactttaattcctctgttatcgtatatttcaagttcattttcagtcccgtctaacccctcaattcttagataatcattcagtccatctttatttggagaaacggcattatacactacaaaagaatctgttttttttactttagcagtagtaaatataacattaccggatacactaacaggagaagagattgttttgtcgtctttgtttactaccccgccttcgtcaagccagctatttttagcactatcccaacgcacaatacggatctcagaaggcgattcaataatacttgccggagttaccgcttcatcccagcttaaagtgaggataagatctgtagtacttcccatttttttaacggtccagtattccttatcatttacaaccagaatattgcttgttttattcttaaaaggatacaaaataccagcatctttctgagagtattttccactgaaagcatcagtattcattttaagagcagaaatcccaacagaatggtattttaattcatctccaaccggaaagttaaagtcattatttccatttttcattacttcaccatttacaaaacttttgtcactaacatttacgcagcctgagccattttcaaaaataaccaaacctccaaaagaatcatcgtcgataattccttctttgaagtcggccattccggaaatgcttaaatagttagaaacctgaaaagttgcagcattaccattactattgttgttaaattctacatcatagagttcgatagggatatttccggatatattctgatgccctgagactcctctcaatcgtgttatacctttggaattaccagaactaaaactgatcaaaccgtcattgtttatatgactgtataaaaataattcaccatcattaattaaaacagctttagatttattatcgaaggcgtttacaaaacttacgggagtattggatgccacaaaaagctctcctgtattgattatttgcgaagtggcaaaacatggaatcaataaaaggaccagtctgctttttaaatttaatattctcatcttaaaaaaattcgattttattttactactgctctatttcttttttttaaataaatttcaaagcttattcacttgtatcttttttacccctgatttctggtcgggtagcactagccgatgtcaggatgttaccaatttcgtgcaatttttaataaagagatgccgttcgaattcctaaacctgtgtttaattcaaaataggataaaaacattattgaaggaatagattttcgctcattactaaacaactatggtaaaattacaagcaatattacctcatatttttagcttatataaatgataagtaactgatggagtatttaggggtatttttggatgctaaaagtaataagtggaaaaactcgtaagatttccaccggttcaatttattcccaaacttaattcattctttgggggtaatttgtttttacgtatatataggttttgtattcctaaaaaaaaggcatttcgcctattggttttattataaactctctcaaactttggagtactatttaaatcaatctttttgttcacaacattttgcatccattcttattggtagtattctaacgaaagctgttgtgtttgttcttacctatccgggtacatctccggtacaatccatctccatttttttgagctgacccacttataacacttcataatgttatatggagagtattaaatcatttgtaagctgatatattccagatataacagcagatataccatttgtttcttcttattaagtttatggttttcttaggattaatattgcaaaataaatgaacgattttgtggaactgaaacataaaaaagaatagaatgagctacagattactatttatttcgattttactcatgttatatggtgcctcgtatagtcaggtagggatagggaattctaaaccggataattccgcgatgcttgatatcgtttcaactaacaaaggggttgttattcccagaattgcattaacaggaagtaatgacttaacgacgatttcaaatggtaatgttgaaagtttattgatttacaacaccgccaccgtttcagatatcacacccggatattattattggtcaaagaataaatggaataaaatagcgaccacggatgacactctatccctaacagcaggtaacggtctgacattttctaacggtaaactgcaattgggaggtgcattagaaacacccactaccctaaccacaacagcgataaatacattggccataaacggattggaagcgggagatctcaaaaccgatgaaattgtagtcgtagataaaacgaatggaaccctgaaaaaagtcccaaaagattcatttctgcagcaaaaacaggagttgtatatcgccaaagaaggtcaggaagaatttacaacagtatctccgattaatgatccgcaaaaagtaaatgtatatagaaacggtatcagagtggatttttccatagtaaaacctggtactataaaattagagtccggtgctatttgttaccaaaacgatgaaatacggatcgtattggtttactaatacaaaaaacttaaacctaaataagtaaataagtaaataagtaaataattaaaacagaaaaatgatgaaaacaaaatctttaaaatttgcactttgtgcaacagttcttttgggagttgccgcagcaaatgcgcaagcgactgcggacgtcaataaaggggcgaaagcggtaaaagtggttgataataaaggtacgataaagtactttcaatccaataacggtattacacagattgtaaatacaactgctgatgtcaccacaaccacatggcaattaggagggcaactgaccaatgatacttatatagatgctagcggaaaagtatttggtcttgatggtcttgctttagaaacaggtgccgcatctaccaatgcaacaacagcatcagtccatggcggaacgggtacaggctggactttgttagtaagagatgaagctacaggtgctaccaaaaaaatgaaagcagaaagtttagtgagcggaatcagagtagagtacacacaagtagccaatgctgctgcgaatgtagatgttcccgtagttggtttaccagctttggcagccggaactacagatgctaaattgtttgtttttagaaacggtattaaattaagaacaggcaccgattttgtggcggcagcagataaagttaccattacctatagtgcggctaatttaccaatgtatgctggtgatgttattgaaattcagtatattaaataatttcttctaaaatcccttcttatgtttcttaaaatcaatattatgttagttttttttgcagcttgtaatttgggttatgcacaaacgattaaagtgcttgacaataaaggaactttgagaaatatcgaacagggaataggaaatcttgctgaactatatattggcagtccagcgactccccaaacgcttgcaggcaccttttcagacattagttttgctagtagcggtattgttgatacttcagacttttctgtagatggaagttctattacgattagtaaaagtggccgatatgaaataacctatagaataagtacaactactactaataatgaaatatccggaggagagttctacctggaggttggaggtacagaagcaccgggtacaagagcgtatacgtataccagaaacagccttgtggataaaaattcagttgcagtgactaaaataatagtaacaacagcagctaccgtgattaagataaaagggcgtacgtatgcttcgacagcggctgttttgtcactaagtatgaccaataacgggtcttcattaattgtaaaaagaattaaatagattttagaaaaaaaatgaagtttaaaattatccttttagtagtactgatcagtaacattagccgtgctcaaatccgtattacttcagcactagcccccacgattaccaatgccggactgggtaatttatacagagcctctgacacaaatcgactgtacattggcttaagcaatggtaccctttttttattaggaagagaaagtggaagttggaacttaaatggcaattcaaatgcagcagcaacaagtttattaggaacgacgactgatacaaaagtaactttggcatctaataatacttctattttggaattgggaaagcgtagtaccttgggactaactttgactaaacctgattacaacaatgcagatcagtacatggcttaccttagaggcagaggaggagtttcggccttggaatttgaaaaatcaacttctgctttatatgaatctaggttttatacgaatatagatggaaatcttaggtggacagggactactggtgccaatgatttttttgaaattggggctggaggttacaatgatatgggttctttagatatcattatgggagatggtggtactgggcctattgtatttaaaaagaacagtgttgccgatggtactactgagatgatgcgaatacaaggtcgtcagcgaaaagaatattttgatcgtaacataacgccaagagatgctagagtaggtatatttacaggtggagcagttgccaattctgttttgcaggttggcggttcattttctttacccattagggcagtaacggccagtacaactttgacagacactgattacacggttgttttaaaatctggaacttattccggcacagaggtcatattacctccagcaagtagctgtagaggaaggatttatgttattaggaatatttcaggagcagacagaaatatatctgcctacataagccggactggagtcagtagaactactttagcaaataatagaatctatagttttcaaagtgatgctacagattggcaacttacaagtgatgattattaggttttatggaatttctcttttatagacctcaaagcattgcaataatcctttggatgtaaggaacaaaaaatgatgtagtacctggaagtatagattttagttgtagaaagagaaaaaaagaaatttttctttctcatagaaaaaggataggtgtatttaaatgaagtgaaaggtgttttttatggatacggaacctatgttacggtgtgttaaatgaatttacccaacggatttacagtaaataaaataacaacaacagtggcgtatcactgtcattaaagcgagtacataagtttttacagcttctgccttatcgcgaaccacgatcaatagtggatctttgttaatcgcgaaaagaattaaacaaatttaagaaaagaatgaagattaagtttatatttttagtagtactgctgatcagtaacatgagtcggtctcaaattactaccacttcggcattagctccaacgtttctcgatgccgggctaggggatttatatttaacctccgatacgaatcaattgtatatcggcttgagcgatggtagcctttctttaataggaagtggaagttggctcttaaatggtaattcaaatgcgacggcaagaagtttgttaggaactactaatgatataaaagtagccctaaaatctaataacaattctcttcttgaattaggaaggagcagtacattgggactaaagtataatagcagtaatacaaatcaatatatggcttaccttagaagagtcggaggagtttcaccctcactacaatttgaagttcccgcaggtactgagtataaacctatattttttatgaatacagatggaaattttaggctgaaaggaggtgccggcactggtttttttgaaattgggtctgtaggtgcagaggacccaaatgtttcagatggttctttagattttattatcggagacaaaggtaatgagccaattatatttaaaaagaatagtgttactgatggtacatctgagatgatgcgaatacaaggtcagggaagtggctcaacaagtactgtgagagtaggtatatttacaggtggagtagttgccaattctgttctgcaggttggtggttcattttctttacccataagggcagtaacagctagtacaactttaaccgacactgattacacggttgttttaaaatccggaacttattcaggtaccggggttacgttacctacggtgagtacctgtaaaggaagaatttatgttattaagaatttttcgggtgctgacatcaccatatccgcatatataagccggactggagtcagtagaactactttagcaaataatagaatctatagttttcaaagtgataatgttgattggcagcaaattaagtgatagttattaggttttatagaatttatctctttattatagattttagagcattacgtttaacgcgttgggagataattgaccagaaaataatgtaacagatagcaacatagattttagttgtaaaaaagagaactatttctttctcatagaagggtaggtgtatcaaatgaaataccttttttagggatacaaaacctacgtttttatgtgttaaataaatttacaataatgaaataacaataacagccgacgcatcactgtcatgtcattaaaggggcatacataggggctttagcttctgttttatggggaaccacggtcaataatgaaccttttttaatcgtaaaaaataaataaatttaaaacaagaatgaagattaagtttatatttttagcagtactcataagtaatattactttttgccagattagtatcaattcggcattagttccaacgattaccaatgccgggcaaggtgatttgtaccaaaccaccgataccaatcaattgtatattggcttaagtgatggtaccctttttttaataggaatgggaagggaaagtcaaagtgaaagaaattggaacttaaatggtaattcaaatgcagtggcaacaaatttgttgggaacaaccactgatacaaaagtaactttggcatctaataatactcctattttggaattgggaaagcgtggtacattaggactaactttgactaaaccagattacaataatgcagatcaatatatggcttatcttagaggcaccggaggagtttcggccttgcaatttgaagttcccgtaagtactgattataaacctatattttttacgaacactgatggaaattttagaatgaaaggatgtgctggcggcggcagtgatttttttgaaataggatctgcaggtaccaataatgcttccttagaatttattatcggagacaatggtaatgagccaattttatttcaaaattacttttattattggggcaattactctgagatgatgcgtatacaaggacagggaacaggtgcaaccagtaccgttagagttggagtgtttacaaatggagttgccaattctgttttacaggttggcgggtcattttctttacccataagagcagtaacggctagtacaactttaatcgacaatgattacacggttgttttaaaatccggaacgtattcgggtacagcagtaacattgcctgcagcgagtatttgtaagggaaggacttatgtcattaagaatatttcgggtacggatattaccatatctgcctatttggataaaaatgggaccagtagtactactttagctggtaatagaatcattaatcttcaaagtgatgctacagattggttattaataggtgatggtttttagatttgaagagtgttttttttgtggtttaacttttgatggaatttctctttagatagatctcaaagtaatttttaagttgaaccagtgaaatcgaaaagaaaattatttttaaccgaaagtagtttgaaataagcaattctaaaacaggataatagctttacattaataatttacattcaccagtcaggttttgctgactgttttttttacgtgtaaagcttggtgttttatccataaacttaaatgaggtctttttttaggtgtatgtataatgattgatccgtttttttaatctagcctaatccttgaatttataaatggacagcccaattttttacgaggtttttttttatgatctaattttttatcaccacttttaagtagtgatattctttctttttagatttgtttttgcaaagtaaaagctctatttggttctgaataagtgatggtcaattagagtagcttgatattatttgattaaaaataatgcaaagtttgaaattttactatgactccgctgcaatatgtcttttaggaatgtgattagacaagatgatgtttcattttaattgagtaagattgtgacatttttttttttatagtagtgtatggtctttccggctgtatatggtcagctaagtggaaacacaggaaatgttacttatccggggggctgatgtaaaggtagtaggggagaaggttttttggtcggtaaatccaagaacagacgagagcagccacaatgatttatggtctatttattattacaatcagggaagtctactaaaatataaaatttcttcggatgatataaaaactatgggagccaaatatgttaatgccctgtgtacaggattatatatccttaaaataaaaaataggatcaagcgttttattaaagaatagtactttctgtatcggttttctaaaatagatgatgtgcttttttaataaattgaaagcgaaaaaataaattaagaagtaattctctttatattaaaaaataaaaaaatgacctttttgatattcaaaatgggtcattttttttacatttttttcagccactagtttcagttgattctctaaaaaaaagcagttttaaaaggatttgttgtttaaagaaaatagtgagcgagtgacttttcaggaaccctctggcttactagtcattttcgggttttaaatcctctaaaatcggagtgctaactgtttttacctccttctgaatttttccgtttttctgttcaaagatcagtatggtgtttttaccttttttaagccaacagcccggaacatacaatgtttgctgaggaccaacactccagtagcgtccaatattgattccgtttacaaaaacaattcctttaccccagtcgcgcatgtccaggaaggtatctccggttttacttaggttaaaggttccctggtataccgtagggcgatctgtttttcctgagttttggtaagccgttatatccggttcctgagccattggtaatgggtacattttccagtttccggtaatggtttcgccattgattattacagggctaataattcctttattgttggcattaatttgagaaccgtaattgatacgtcccatattctccaccagaatatctagtgttgcattaaagggaacttcaatttcacaatcgtattttttgtaatagcggtttagctctgctactttttttccgttgacatatactatggcgtaatcacgtagtccgtttaattctagtttcccactaataggctgtgtaaatcttttgctgtaccaaacataaccgtctccctgattgagctgttcaaaggttaaaggatggtctgccgttacaggagggattttagactttaaatcggctaaatcaatggcttttgttaaggtaatgttcggaatagtgatcacaggcatttttgccggaacagccggagttacattggttttaagcagggctcttaacgcattgtattttggggttgcccaacctgcttcgctaattggagcgtcgtaatcgtaagaagtcatgtcaggctgaatgtcatgttctttgtcgtaattggctccggaagtaaaaccgaaattagtcccaccatgcaccatatagtagttgaatgaaaccttattgtctaaatatttttgtgtttggcttgcagtttcctcgggagtttgtgtcgggaaaggttctgcccaatgatccagccaacccggataaaattcggccaccatgtacggaccttgtccgttgttgaattggttgaccacattttttagttttgtaatatcactttcgccatttgccgttgggagagcacccggtaacgctccgccttcaaataaccagcttccgtctgaagtaaagaaaggaacttcgaaaccaatatctttcaattgctgaaaaacggctgcactgtattttttatgttcttcaagtgggatgtctttgcgttgtgctacataggatccaaattcattttcgccctgaaccataataatcgggcctcctttggtgatttgtaaattcttaacctgatggtacaattcggtaaaataagcttttgtagcccccagataggccgcattatttccgcgaatgaccatgttaggaacattttgtaaaaaccacggataacctccaaattcccattcggcacaaacataaggtcccggacgtaagatcacaaataaaccttcttcctgagccgttttaatgtactcggccagatttttatttccggttttaaagtcccagattccgggtgccgtttcatgatagttccaaaatacataggtggccacagcatttaaacccatggctttcatcatctttaaacgatggcgccaataaggctgcggaatgcgggaatagtgcatttctccggagtgaatttgtatgggttttccgttcaacaggaaatttccattggcaatagcaaaactttgcttctcttgtcctgccgcagaaagggtgagagaaagaaacagaaaggtaaggtatatttttttcatctttaattgtaattagtgttgactataatgaacaagagagcactataaatcgcgccctcttgtttctactaactaaccaataaatttttattctgaaaattctaattttttcaacttgttccatccgccacgtgtaaaatcaggaatttctacaggagctgaaccgttgtcaagagaaatctctgttaaaggccctaaacaagaccattcggctaaatcgtaaacgtccatgtctaacggaagtcctttttgcagacagtaaatcaaacggtaatccattacgaaatccattcctccgtgaccgccgacttttttagcctgctcttcgatattttttacaatcgggtgtttgtatttttccattaatgcttttttcacctctgcaggaacaaaagagtgtgcgcttaatttttcgtgatttggttttacgtcgtcacctagttctttgccgtctaaagcatatccttctaatgggtatttgttggcaaaaccttttgtgccgcttaattggtacattctgctgtacggacgtggagaggtaacatcgtgctgaatctggattgtttttccgttttcggtgcgaatcatggtcatggtgtgatctccatttctaaaatctttgatttcttttccagatttttctttgatgtaggccggatttccaactgctttagtgtccatagaaactaaaaagttcattttgtcaccacggtgaatgttcaaagcctgacaagccggtcccataccgtgcgtagcataaatatcgccacggtgtttgatgttgtaatccattctccagttgttccagtattctccccagaaaggctgaagtccgtgaatgtaagatccttcggcatgtagaatttctccaaacacaccttgctgcgccatgtttaaggtagtaagttcgaagaagtcgtacacacagttttcaagttgcatacagtgtttacgggttttttcggaagtatcaataagttgccagatttcttccattgtcattgcacccggaacttctatggctacgtgtttaccgtctttcatggcctgaacaccaataattgcgtgatgtttccagtcggtagcgatatatactaaatccacattaggtaaagcagttacttttctccaggcattttcgtcaccgtaaaattcctgagctttaggaaatccggctttggttaaggtttcgtttgctttagaagtgttttcctgtgtcatatcgcataaagcgacaatttctacacccggaatatgtgtcatgcgctcaactgctccgggaccacgcatcccaagacctataaaggcaacacgaacagtaggtattggtgctgttgccaaacgcaaaacatcggtctggccttttgcgcgggcaggtgttttggttttaatcatttgtgccgatgcgtttgttcctccaaacagaatacaggcggctaacatgaattttaaaatactagttttcataatgtattattttgatttgaaatgattgataatctaaaatccgattatcggggattattgttgtgttgtatttttagtaaaccgttgggtgaaatgcataacgagaatgttttttgccactgattagaaagattcacatagattttacacgcaattagtaaagaaatctgtgcggatctttctaatctgtggctaattttatcattttagcattgccatggttgttcatcataattttatggtaatgtattgaaatttatttcgggttttttattcgttaatggttttgtaaaaatagtttttggagtggtatagtcattaaaaaaacctccgttttttagataaaagaaaccctcttccgttcctcctgcaaaatccattcggtattcttttgccccagtgttgtcgtttgtaaagcgtgctgaattaatttcgaaccagttgcctttttcatcacaaacccattgattattgaacaggactttgcgtgacagatctccctgttccgggatgaaattttccagaaaggagtgaaatcgtttcaaataggtattggtttgaggacgattgaaactggcaatcaataaccatttattcagttcgggagcataaaagtaagcggtatagttggtggtgttattaccggcaggcaatccacgaagtaaaaacttgtaggtgtttccagctttccaattgtattttaaataactctgtccacctgaaccttcgttgccaaattcgcctgtgtgtacattttcaccttttttcagcagtttaattttatgagtttccggaatactgttaggatcgtcagtggtaaacgggctccaaaccgagaataaaattcttctttcggtggctgagtttacctgaattccaaagtaaccttcgccaaaaccatttgccataaaataagatccaattttatcctcgttttgaggaacggtaatttcgttgtaataccactcggtgttggtgttttctggagtctgatagtttaaatgaacagaaggtccacgacgtccccagtgatagaaatcaccttcattgttgggtacatacgagattttaccgtcaaaatcagcacttgcaatcgttaaacgactaatagacgggaaacgatcgccggttttactgattccttttattttaacagcaatatatccttcttttttaaggttccaggttcctgcaataacagccttttttgaggtggtgaagtttacttttttagtttcgttattgatcgaaaattccagttcagatttcccataaacttcaacagatccttctacggtaatttgaaaggttccgggtttagaaattctgaaataggcggtgaaaaactcgttggaatctgtccagttttcgataccattatctgtaatggtattttttccgtctaaatgtttagaactatacgcatttcctccaaggggcagagaaattgttgtttttggattttctatggtttcattttccgatggtacatcatcattgctgccaacacaggaaaccgaaactagaaaagaagcaaaaaacaggtatactatttttttcattttttgagattaagttattataaatgtattcttcttttttaaattaacctctctaactcttttaattagagaggtataaacaaataaatatttaaaatgattatttaccacaactaatacattttaaagcatctttcaggtttagggctccacatttgctacaaatagcatgcatcgagtttgatgaaccatctactgctttttgttcactatatccttgagctgttaagtcaatatcaccttccgcatttaaagaggtatcattatttattgaaagtaaagaaagctttgcattagcgtattgatttgggcctgaaaatttgacagtaaccgagaatgtattaattccgggaagcaattgtgtagttattgttcgattagaaggcccgaaggcagaagttattaatggaacaccaggcattctaacttcatatttagtaggtacatttccgtggtatccaaattgaaacttagcctcaacagcttgagaacaatatatttctccaacaattactgcttcagttcctgaattaaattcttgtgtgatctgaaaaagggagtattgtatactacttgattttgcagttaaggcagtagattttttagcgcctgattgtgaagtcgaagcttgatttgatgatagcggttgttctgaaatttcttcattgacacaactgaaaataagaagggataaggaaagtaagcataggagttttttcatataataaggtttaataggttaaaaggattattataaataacctctctaatggaccaaattagagaggtttcaaaacaaacaataaataaaaaactatgggttttgtgttaaagttcccggataagcattgacttcagattgtgggatgtattgtaccacacgagggcttgttgccggaacatcattcattggtaaatgaggaccagggtaacggcgtgtcatggtttgtccgtttctgtagacgtcataaccacgatgtgcttcaaaagccaattctaactgacgttcttcatcaatgcgctgtgaagcatttgtactgctaagagaggtgtagcctccaccaacaattgctctttcgcgaataatgttcaggttagtcaaagcattagagtaatctcctttttttgcataagcttctgccatgttcaaatacatttcggccaatctcgagatgataggggagtgcaggtgcgaatcattattttgcaaagaacattttgtgatgtaaaacattggatacacacggtttaaaagcatcatgtaatccttttctccggtataggtttttccctgataagagatggagtattgattttcggctgcatttactactgtaaggttgtaatctgttgttccaattgtgataaaataggatccgtcagcttttgtttttaatggttgttgcacataattgtatccggtttgtgtaccgccggcattgaaaacatccgttataaagcggaaagcctctgttttatttccactggcatctttggtatattgcggatcaataaaagcccaacgcgcatcttttttgagtccggattttctcaacaagtcaaggtattctccactggcatacatttctccccatccttgtccctgaatattggcatacattcctccaattccataataatgatcaaatcctgaatattctgaagctactctttttattgcaaaaatagtttctgtttgttcagcagcatccggcgcaaaagtattgtatttcataaagtttgcacggcttaataagttgtatctgccactcatgattacttttttggcataatcaatagaaagtgaggcatactcctgatttggcgtttcataggtaccactcatatacaaatacactcttgaaagcatggcttgtgccgcttctttagtagcataagcagcagattttccaacagacattagagcttccgcttttttcaagtcgttaatcgcttggtcataggttgcttttacagtagaacggtccggaagttttagattataaagatccgctggcaggccgtttacaattggcacacctaaattggtctcaggcgattgtgcgtaaggtcttccatacgtacggcataagtaaaaataaatcatgcctcttaagtaataagcttctcctaattgctgatcgatagccgggctttctccttctttaatggatgttatcaaatcacttgattgtgaaatgattttgtaaccattgttccaaaaagtagataatctgttattgtcaggaacatgctgataggaaataaaagagtaaaagtgatccgtagaagttcctctaatcatgatattgtctcccggatattcaccaacgcggtgcatcacatctgaccaggtttttaattgggcataacagccgtttagtaatacttctaccgaagcttctttatcttgttgtattttatcttttgtataggaagaaaatggttctctgtctaactcacatgagctcagaacactaattgcaatacctaatagtaatatctttttcatgattttattttataacgttaagttgagacctagtgtaattttacgtgtttgcgggtacatgtctctggcgacaccagaaattacatactcttcagttgaggcatcccaatttggtgacaactcaggtgatacaccagaaaaatgggagatggtaaataagttttctccggttataaataatcttaagttggtaatgtgtaagtgttgtaacggtatgttataccccaaagaaagacttctcatttttaaataagttccggtttctaagaaacgggaagatgatttttgagagttactaggattgttataaatggcttgtggatgtgtcgcgatatcacccggtttttcccaacgactccacccgttatttagattcatttggtttctgtcagaatatgcaccatccgagtcaaattctgatctcgcatagttatagatttcacctccaacagaatagctaaaaactgctgcaaaatcaaagtttttatagtttaaactggtagagaaccctccgaagaagtcaggagtataagagccaactactttttgatatttagacgcctcaccataactataagtttttacacgttctcccgaagcattggtagtaaaccattgcggtttcccattatcaggatcaacaccagcccattcggttaagaaccagctgtctacatcgtatcccggttttagtaattttttagcagcaccttctacaccgcttcgatcggaaacaattatttcctgtttgtcaccataaagaccagttactttatttttgttaaacccaatattggcgtcaaaggaccaaaccaaatctttagttttgatgatgtctacattaacagaagcctcaaatcctctgttgtttacagctccaacgtttctccaaatacgagttactccgataacacccggaagtggaacctggtacaataaatcagaagtatctttatcgtaataatctaaagtaatatttactctgttgaagaggcttatatccagaccgacaccggtagtaaatgttttttcccagcttagatcgggatttgctaattgtgaaattaaggcacctgggttttcatcatagctataatcaaaagtatataatggcaagtggccgtataaactgtttgggcgatttcctaccgaaccatagctagctcttaattttaagttgtttacccaatctgctttaaagaaagcttctttatggatattccatccaccactaatagagaagaaattaccgtattgagcatttttaccaaaattcgatgctccatcacgtctaaaagaaaattgtgccaaatatctattatcataagaatagttgatatttgatagtaaagattgcacggcccattgtctcttgtttccgtttacagcttcaggtttggcagccgggtctgttacactaattccgggaggaatacctgttgcaattgcctgtgtttttttgaaattatattcgttccattcataaccggctaccgcattcacattatgtacaccaaacgatttgttaaaccttaacagttgattggtgtatagcttgttataagtttcaaattgatcttcaattctaccttttacagctaaggctgaagacgatctaggatccgaataagatgttgaattgtaattgtcaaatatgtaattgtttacagaggaatacgtcagccagcttgttaattttgcatcgaaatccatattggcacgaacagtatatttttctgattcagaataattccattgtaaatcatacaaatagttagatccggtcgtatttacccaagttgggtttggtgcatttcctactaatgatccatccggtaaataaggactgtcccaaggcaggttacgatacattgctccaacatcatgttgctggttgtatactttttctcgcgttagattgatctgtggttttatggtaagccatgaaattggtttgtattcaaatttcatcaaaccgttataccttttataatcgtagccctttatagctccggtttcatcataaactcctaaggaaacataacttttaaagttttctccaccaccactaatcgataagttgtaatcctgagcaatccctgttttagtaccatttttccaccagtcgtagtttttgtttcttaattcaggagtccaccaccaaacattttgaaaatcttgtttgttggcgaaagaattgtaataatcatacagctcagatccgttcatcattttgagatttccattgtttatggtagacagtgctgttcttgaagagaaattaatgattgatttcccggctttcccgctttttgtagtaactacaattaccccattggctccttgtgaaccgtagacggccgtagaagcagcatctttaagaaccgttaaattttcgatatcagaaggattcataggaggagaactgtttccaacgatcacaccgtctactacccaaagcgggtcagtgcttccgtttacggtagttttacctctaataatcacttttgaggcaccaccaggctcacctccactggtactgacaaaaactccacttgcttttccagccagtaagttttcaacagttggagtagtaacatccaataactttttgttgtctaaagtttgtaacgatccggttaaactctctttttttactttgctgtaccccacgataacaacttcatccatctgctgtccggcttctttcattgtcactttaatagtgccgtttccaacaggaatttcctgatcctgcattcctaaaaaggtgaatactaaaatcgtattagcattgggtacttcaatggcaaagcttccatcgatatcggtctgaacccccgttttggatccttttataataacatttacacctggaatcggaattcctttgtcgtctacaactttacccttcactattttttggaaggccagtaaactggttttgtttaaagaaatctcttttgagggagcagcagttgtaatttgaaaagttacggacaacaaggtacacaatgttgtttttaaacttttatcaagtactgtctgcaactttaaaatcttaggattttttgaaagtgcttctttcatacttctgtttggtttttggttaatgattgttttttgcggttattttttgttgtaattatgatgttgattttttattcttttttaacctaaaaaagcttttttaagaaggaaaaatctgataggtagttttaactacctgacgaaactattgattatatttttattaaccaagaaaaaacacaaaaaatgtgctcgaacacacaaaatttgtgttctcgagcacatttttttgcagaatagcctaaatttgaccctaaaaatagatgagctgcgtagggagcaaaaaataaagactgaactaaaaagtgagaattttatgggtaattgtaattgttctttgtaaaaagaattaattcgtttaaaaacaggtcttatttatgtaaataatgtttttttggattactttgttatgaagtaaaaaaactataaaatccctatttttttagctgatttagggcagcgaaactgggtttttcggaacagagaattttggaaggtttaaaagagcttttgattgtaaaaaaaagatgcaatgaaagtcttctaataatattttaatttaaagagcatattttttcttctggataaaaaaaagcctctctaatcaaattagagaggctatagaaacaatatttttaagtactaattataaaaccttgtttctttgttattttaagtaaggccgactattcagctattggatgcttacttttgattgttaaattctgtaagcaaaggcgttatgtgatttctggtatcttcgtctaaagctgcttttattttatcagcctcttccggggaatatttcgacaatcctaagattcctgctgcggctacattgtaagattggtttttagtactttcaatcattaaatttttgtaagcagcatcacccgttccggcaagtttgataatggctgaagctctcgcataagtttttttatcattttgggcaatgttcaataaggttttaagtgcagcttcttttatagtattgtctgccaaatcaatggcacggatactgcgggttcttaaatcgtctctctggtcttgtaggccagctaaaagaatcagctgtgcctcatgacttttgtcttttgccgcaaattttatcgcttcaactcggttgtagtaggtaggaacgtttttgtattgatatagataatcggatatttttttattgtcaatgaccttacccactaaaattttgtccggatcaagatctatgaaatcgggttttgaaggcaggtcaaaactaaaatcctgctctcttttgtccattaaaatatcttttctgactttggttccattaacataaaaatctacttttaacggtaaggtaaaggtttgtacggaactttcctggacttgttttactgccattgttgctttaccatcggcataaccgtattcaatatttaaaataggatttccgccctgaaagtaccattggttaaaataaggactccagtcttttccggttacttcttccattgctaaacgcaattgatgactttctcctgttttgaaggcattggtggtaagatacttatttaaagatttaaagaaggctgcgtcacccatttgattttttaaagcatacaggatgatagaacctttggaatagctaatgttgtcaaacatatcttctttgtttccataatgaaaacgtgccaatggcggactaactccatctttggaagaacgcaggcagttttgtagtttttcataacgagaacggtcttcggcatcctgtccttcatcatacccgtgccaaaggacttcaccaaaagtagcaaaagattcgttcatggttaagttcgaccaggattcggcagttacataatctccaaaccattggtgaaaaagttcgtgtgcaatagtactttcctgattatcgtctaataattctctttcggttttttgtacgtgctcaccatgtaaggttgccgaagtattttccatggcacccgaaacatagtctcttgctacaatctgagcatattttccccatggatattctaccccaagcattttgccgtaaaacttcatcatatccggagttttcccaaaaatttgtttggcgtagggcgcatattttggttccagataataacttacttcttgtccgttataagaatctttgtaaattttaaaatcacctacagccatcataaagaggtagggtgaatgcggcagttccattttccaggtatcggtacgtgtaccatttttattcactttttgggagattagttttccgtttgaaagtgaagtgtatttggcatcaaccgtcatcgcaatttcagaagttgttttctgattgggtttatcaatggttgggaaccatgccgatgaggcttctgtttcaccctgtgtccagatttgaatcggtttgtcgtcttttccgtcagggtttataaaatacaaacctttcgcatccgttatggcagcacttcctttgacttttagttcgtccggttttgcggtataatcgatgaaaatgatgtatttttcggtgcttttatattttctgtttaaggtgatcaaaagctgttcattgtcgtaggtatactttaacggaattgtcttttttccatcaaccatagcaatagttttgaaatccattcctttggcatccagtctaagagaatcggtatcataaaaatgaggttttaaagtcagccatccttttccgtataaataacgttttccataatcaaaagatacgtctagtttggtgtgcacaaggtcatttacttttagcggggtaacctgataaacagataatgggtttttggtctgatcactgttttgggccatcgtattttgcccggcaacaaggaaaagactaaaaagagaatactttaaaaattgtttgttcattttttggtttttagaatgattattttgattgattattgttttaaactattattctctgttgggtgtaattcattttaacacatagtaacataagtgctgcacgcataaaaaagacgtttcacttcatctaaatacacataatcttctatttgaaagaaatttatttcttttctgttctctttttacacatatcccgatgcatcgggactatctgtttaatcttttttatatccgacgagttgctattattaaagcggttgaaatataattcttaaggtttcaaaaaagtatttacttgccataaaactcgtatttttatttcgaaaaatacaattttaaccgaagtatttttatagtttttctataattcgaacttcaccatctttctcctcttcggttaaaatattggattgttttttactatacgtttcaaaagtccattgtacaattttgttgtcagggtataacctggcttgtttttgcaaccattcctctgctttttgtgccgaagcatttttttcgattgcccaggccgtaatgagttggtttgccggaagaaaattcataaccgtattgtcaactttggggttaaaagcaataatgttttgtaaagcatttttggctttgtcggtatcgcccaagctcgtgtaacattgataattgagccaattttcgagcctttcgtcaatatcttcggcataaggttttcctactcctaaatttttaggccatagtttagcatccgaaatcaattgtaatgcttttttgtattgcttgtttttcatttcggtcaaagcctgcatcagttttgcttcatgatacaattgacgtcctgcagtagcgccttcaaagggaaggatttccagttgggtcaggaaagcatcggcggcagcgtattttttgttcaggagcagtgttttggcatacagcattcctattaaataattttgaggatgttttttatagaaaggtgctgcggttgccagtgctttatcaaattgtttttgggcaatgtagtattcagttaaaagtttaggatatctccagctttgaccgtctattttaatcgcttgctgcagactggatagaaccaattgggtctcatttttaaataacgaagctttggccccataaaaagccggatcagcaggcagattggcacattgcaaaaacaattcttttgcttttgatacattatcgcgattccattcgattagagccaaatgatatttcaattgccactggctgttcgttttgattagtttttccagaatttgtgctgtttcttcacggaaagggaaactattgtcgggttggagtttgcttaaatcaacagttttgttttctaaataagctttccaatatacaatttcagcatttggaagggcaagtgaaagtacttttaaagcttcttctttacggcctaattgtgtataccatattcctaactccagatacgtttgctgtggcatttcgttttgaatcaaagccgtaaaatgctgttttgatgcctctgacgaatcccaaagatatttctcaaaaccaacaaaatgattaagaggatcaacgttatttatggtattgagaatttcgactgctttacttttattattttgcagacgagataatacggcaagtaattgcagactttctaaattatcctgattgttccgtaaacttttttcggcatattcagctgcttttgcaagattgttttccctaaagtaaattttgcttaaagcagtataggcagagcttcggaattcaacgcttgctgctgcgatatcaaaaccgtccttggcatcggtagtattgcctaaatgcaggttggctaatccgtaataataattggcagcgggatgataggtatcgatggataaagctttagctgccgaatttacagcttcctggtattgaaatttacgaatttgtaaaatcgctaaatcagccaaagcaggagcgtagttgggatctttttgaagacaggccgttagtttttcttccgcttttacgtaatctttaaaactaaggtaattttttccctgcaggtacaatccgtacacggagttgtggtcaaaatcttttggagtttctaacggacgattcagatttccatcttccggtgccgaattccacacgagtttattttcgccaattgttagttttagttggtttggatcaacaacaatctgaatagaatctttgaaggattgcaatgtatttaccgaaatatctttggaatagatttttttgccattgtcaaagacttccagtttttcgtttagtttttgaagtggagaaaaatagattttcaaccagccgttttcgtttttaacgtttacggctccatagttatttgcttttacaaatcctttggtttgttttaccggaaaccagtattctgtccataaatccgtttgataaggggtgaaagagcgctgtttaaaaggagttaaactgctgttttcactcgcctgattgaacagtcttccactttgaacttctacatattgaccgtcggtatcggttaataatttttcccagatcattccttgctgagacaatccccagatccatattttcttgccgggtttgtcgtcgtgattgccatatcttcccattccgaaatcttcatcatggtaatatccgccaaagaaatcgtcgtatttgccaaaaacatgatacgatttgtaaccgccaaaatcattgtttttgtagaaggaaaggtctttgccattttctttatcaatgggccatgaattgtgctcaccattgtgaccaatataactttgtcccgggtaaataaactgtagactttcagcagcttttataccggtattcatccaggtatagtaaggctgctcggtttcggtggaattgaaccagaaggaattggtagtaaaatacgctttgtctttgggtaaattaatgtccagtttccaggacgttcgtgtgagcagatccaatacgccaattacacagcttacacttccgtctccacgagtaagggtgataaaatccacaggggtagcacagttaggagtgtgtccgatgatgccatagttgccctcgacaccaccgcttgtccaggggccgcgcatggcgatatcccggaacttaatcacatgattgttgtaaataaagtcctttcctgttgatttctcaatggccgaccacacttttccaccaatttccggaagaatcatgagtttgatgtaatcattttcaagttcgattactttccattctttttgcacaggtttatccgtaaaaccgtcaaaacgaaaataaggatagacttttgtgtctggtttcggaatgggatcagggtctgaaaacggataagtggtgaatacttttttgtattcttttatggtgggtttattttgtgcgttgacaaacaggcttccaaaaagtaaaacggataaaaagggtttaattttcatgtggagagctatttatggtttatggtttatagtttatggtttgttgtttatggtttgttgtttatggtttgttgtttgtgcaatgttgtcattccgaggaacgaggaatcgcacaggaaattccgtacagaatgtcgccaatctttgtcgaattactactgtgattcctcgttcctcggaatgacaaacaaggtgtgtaatcgttataaaatgaaaattatttaacaatcaacaaccagccttttccttttgataccggtatttcgtcttttgcggtgaaggtttgtgccggttggaaatttagcacttcaggagccgtaatagtagcttttgccggattgattcctaattttttccagtcgatattaagtttcacttttacatccgtatcggcccagcttgcaatagaaattaaagcagttccgttttttttgtaaactgttgccagtactttgtcgtttgatgtttttaccggacagttttcactccagtatccaatcatttcagaacctttaattccaaaagtatcccataatttccataccggtcttgggtcggcattgtggctccatggcattctgttggtcattccataaaccattcctctccaagggtttcctccgtcctgtagcatttcacccattaacccgaaaggaattccgcttacttcggtcaggaaaaagtcaggattgtttttttcgtaatcaaaatactctccaaaccatagtttgttgatgtatggaaagtgctccatatacaaattggcactgttgttaaatccgtcacttttgttgtattgattggcactgtggagatcaataattccaggatgtctgtctttggtaagcactcttttgattcgtttcatggtaattcggtcaaaagcaacatcatcaagataaacgccatcgatacccacattttgtgtcagccagttcattccttctacataatagttgtgccaacggttcatgccgctgtttacaatggcagcgtctttaatttcgggtacaaaccaggccgcaatataatcgtctcccacatgttcctgtagccaggagaatccgcctcctttacccggagagtaaatttcatgtcctaaacttcttaaagcaaaagtttcataagctttgtttgaaacctctctgacggtattgtagatttttacttttaatcctttttcatgagcctcatcgatataacttttcatttttttaaattcaatgaaaggataattgatatacggattaatggcgttggcatgatgaatattgattactgttgccccggttttggcaatcgtatcgatatcgctgtatttgtgataaaacttagtgtcccactgaaaatcggtattaatggtgtggaaaggggtaattagtaaattgaaattataatacaaaacatctccttttttcatgtttcgggcgccgctgtacgcattgaccaaaaccgattttgaattaggagtgatggtaattcctcctttattttcgttcccccaggaagttggaagcaataaaggcttttgcaggtaaaaattggtgtttaacggacgactgtatttctcgtcgcgtaaagaaaattgcaatcctgaatttacatttccaatccaggccccatcctgatttttgtgcgcaacatcccatttccagtcaaaattggcaggacgatcgcctcctttttgacctaatcccatcatgtattttgcagaagagggctgaattggcatttggaaattgatatcattaaatacagcatcttcaagtgccgtgatttttacggtgtacgttaaaaaaccatcaaattctaaggaagcatgtacatccatctgaagtgattttgctgtagaaatactttcccaggaaaccgttccgctttcttttttcagaaatttaaggcctgtgttcttccattgtaacgcttctttaccagaggcatccaaaaaatgaaaagctaacggtgcacttaaaatgtcattggcttttgaaccaactgttgtcatttcgggtgtgaaataagtttgaatttgtgttggaaaaccattggaacccaaaactacttttctgcccaataaggagatttcggtatcttttacagtcaatggagtgtaaggagcaataaccgtattttcctgtgccagagtagaattcagccatttcaaacgtgtcattttctcaggagaatcgataccgccgtttttagtaatttcattggttacttttatctgaagcacaatgtcttttgattttccatcagcaattacggttgctttaccgctgtaggttcctgtcgccgcagtttccgggacattgatgccacaccatagggcttgtacttttccttttgaaaccgaaacggtattggtaaaaatagctccatcgtattttgttccgtcagtattgatacagttaatgtctttcgattcgatgatagctccggtagaactgattaaattcgaaaaggtaacttttacgttgtcaagattctgcaaggcataaacgcctaactgaaaggcaagatattcgcctcttagcgccgtgtccgaaaaggtattttgaacgcctttttgaatccatctttgtggcaaatcatttttcattctaatggaatacaagcggtcttccgggaataccaaaaaggaactgccgctgtttttggcgataagatctttagtttcggccgcagttgcgattacttccatcggataaaaactgttgaacgcatttacactctgaatttcggtaaccgtacaattgtcagttaaattggatttgattttagcaagccattgcgcgtctgctttatcttcaggtttagcgtaaactccttttggatagttagcgtcaccttcgtcaaggtatggcatataatacacataatacgttccttttcctgaaattggttcaaagaaaatagtacccttttctctgttgatgtcagccgtttttatgtttgaaatggttttgcctgaagcatcctgaacaatgatctttttcagttcgggtttttcgtctcttctgcgccattcgatcgtagttttggcaacatctccggtaccggtaaagcttactgcaactctgtgattccctaataagttagggttccaactgtcgttaccgtctgagtattttatttgcgcggttaacggaatgctgaaaacgaataggcacagcatcaataatctattcaaaataggtttgttttttaggtttgttttcattgttttattatgtgagttgtgagttgtgagttatgagttgtgagttgtgagttatgagttatgagttattagttactagttatgggtttcggacaataaaccaaaacaaataaacgattaaacaaataaacagttaaacatataaccatactaatataccgctttccatccattttttttccaataggcaattatgggtttgtaggggccgtatttgtgttgttcttctgagaagttatcactgaaaggactgtgtgcatagtcaataggtttccccattttattagggtaatcaaatgttttggggttaggtctgtcgtgtacggaatcatcatttacataggctgcaatatcgagtgcctgtaagtcggtgagatatggttttcccaggctgactttatcgtatggcatattgctttttagccattgtgcctgtttgattactctgtgcatgcttgaaccgggctgatagccgtattgtccccaaagcggcgggtaggtgtagcctgattggtcggcattgtaccgaccttcaccgttgtttccgtggcagcgggcacaattttcgataaacagggcttttcctcgttcagggcttgcggctacatccggaaattcaatttccagatttttggcgcctttgaaacctccatctttcggaacaaatttgctgatccatttaaagtaggataaaaaagcgatcatttctttactgtcgagcgggagcggtttcccggaatgtggacgcatgatacaattgttaaccctttcggccagagtaaggaccttattttcacgtccgcgatactgtggataattgtcgtgtgatgccattaaattaaaggcataaggttttgttcctgcatcttggtggcagttggtacaattcatcttgttgcctaaatattttcctttgatgccgtttggaccaatataataagcggtttttagcattaactctctaccgtaacgaacggattctccaaatggatcgtccggaatttttgaggtgtcaatggtaatatacgaatcatcatcagcagttttgtttgctaatgtctgcgagttggtagtattgcacaaattgaaaacaacaatcggcaatgctgcaaacagaccaataaggattatttttttcatgttttttattttttaaagactgcctttaattcaacagaaacggttttaagttttcttcaggaatgaattgcacccgataaggcggaatttcagattctaatgcccataataaaactccttttttattggttaaaaccgtaatatgtcttttggaacaacaagccaaaatgagttctttattgatcatataagcacttcccattctgtcgttgtaaacgtcttttggcaataggatgtggaaatccagttttacggttttacctttttcatctacttttagtgcaaaaacagaagattgttttttgtcgactccgttgtcaaaaaacatcagactgccttcgggattgatgtgggcggcgtgtgcctgagagaaatcgctgtcttgcgacattttaagatttcctcctctccctaatttccagagtacttttccagttctggcatctattttccagatttgaccgttgttgtaaaacgagatcaggaaattaccgtctttatcatagtttaaactgttggcatgcatccagtcttttttggttttgagtagttttttgtctttcatgggatctaaatcgtcaaaaacgctccatttccaaagctgttttccttttttgtccaaaatcagaatcccgtcgccattaatcgtgtctttttgttttccgccaatagaacttagatcggttattctttgatcgacaaataaagtgacaatttcgttagccgattttttgatgatttcgtgatgaattacctgttttaaatcgccttgtccctttttgatatgggttagggtatcgccttgtaagttgatttcaagtatctcacttccataacttgtgggttcgtcattttttcccagaatggcaatgatactttgttctttggtaaaatgagttactttaaaccctgttccttcaacggtatgataccatcttaagttacctttataatctacaatataagcaacgcccggtgtttctcttttggccaaaagcataaaaccttttttgaaattttccggcaccagttccggtttcggacagtttgctttgaattgtttttgtaaccattccggtaattttctagatttgaaggtatatattttactactgtctttttcctgcccattgctcgtaattaactgaaaatgatattgagtttcaggagtaatgttgcaaaggaccaaagaatgagacagaccagcttttgaaactggagagcttattctattttttgtgtctttttgagcaggccaatactcggcatagacctgaacattttcgttcgtagtcacatcgatctgaattttcaattcgttgttgccatgaatgccaatattgatgttcgttacaggagttccctgttttttagaacagcttaccaaaataagcaggatccaaataaatactccttttgctattacatttttaatcatctgaaaggcttcttttatgaaacagataaattatactgtttatagttaaaaatcaggaacagtcaggtatttcaaaacccgctgttcctgatctgatttctgttattgtctgtcggcattactcaggttcggatttaagtcgacctgactttgcggataggtgtaatatttgtttttaggcatggtgataggtgcggtttctccaactcttacgtgataggcatttaccagaacatcaaacttattcattcggattagatcctgacggcgctttccttcatagaacaattcccatcctctttcttgcaaaatagcatctcgtaatgaagttttattataatcggataaaaccagcagtttggcatgtgatcttccttttacctgattgatgaggtctatggcttcggcagttgggccgtttatttcgtttaaggcttcggctctgctcagcaatacatcagcataacgcaatatgtttacgctgtgaccatcataataagttgtcgtttcatcatcggcatattttcgggtcgatacgtcaggcatataaaactctccttttggtggctgtgctcctaaggaaggtgcttgtttgtgaagcaatttatcagtacccataaactccgggaagaagcatttttttcgatcgtcttcatttccaaaagtattgtagaagtcccagtttacggtataatactgccatctgttttcgacaaccggatgatcgataggaccaaagtggttcagaagttccgttccgtttacattggcatcgctaagagacgaaaagatgttttcactgcaccatttgttactttctttaaaaagccccaaataagtagggaacaggctgtactcgttgaggttcatgacttgttgtgtaagcgaggctactttttgccagtcacgatttcgcaaatataattttgccaataacgttaaggcagctccttttgtagcacgacctacatcgttactttcataaattgcatttttcttgtagttaacgggtaaaacggcagcaacatcattcaaatctttaattaaaagcgcttctatagtttcaacagaagaaggcggtgtttgctccagatagtttggattgtctaagttggcttctgttacaaggataacaggtccccacgcgtctgttaaatccatataagcagaagctcttaaaaatttagcctcggctataaactgagttttttcagcttctgtaatgccgctcatttttgaaatattaaaaatcgcaaaattggcgttggctaccagtttgtacatggcattccagtcttccaaaagcagaccattggcagaattccaaagtcctaaagataattgcccggggtcaccaccgtactggcagtgtcctaaatctgtggcaatatcagtcaaagcaaaatgccttgttgcccaatacgagaagttgtctcccacagaagggccttttaatcttccataaatagaattaatagaagcgatagcatccgatttggtttgaaatccattagtatcggtcaaactgctgtatacggtaggatcaagatcgtcattgcatgaaaattgcaaacctgctgtcagtaagaggaatatgattgtatattttttcattttaataaatttaatgttactaaaaaagcttttagactaatgaatggcaaccttaatacccaaaatgatggttcgtgaagccgggaatgaattgaaatcgattcctcctcctaagttttgtttggtagtatcgttggtgaaatgtccgtttacctcaggatcatttccggaataattcgtaatggtcaataagttttgtccaatggcatacaatctgatattgtctacaaatttgagtggttttaaaacactttcaggaatagtatatccgatagaaaggttttttaggcgcaggtaagaggcttcttctacaaattttgaattgacataacttccataagtacttttgtaatagccgtctcttggaacatctgtattttcattcgtaccggctacccagcggtttaaagcatctgtactggttgttgattctccaaccattcgggtcatgttgtaaaccgaataatcaaaagctccctgaaaaaagatgttcagatcgaagtttccaattttaaaatcattgttaagcccaagagtataatgaggtgttgaattgcctaaataagttctgtcgtttacggtaattgcaccgtctccgtctaagtcttcatattttggatcacccggtttagacaaaggctgcggagcatatacttctccggttttgattactccggcatatttaaaaccatataaaacgcccatttctctgcccggttccagtctggtaaattcgcgtcccgaaactgttccgcttggattagaagtattctgactgatgatagacacattatcggcaagtgaaacgacttcttgtttgttgtaagccacatttagtgaagtggtccacaagaaatgatcatttctgaaattagtactggtaattcccaattcaatacctttgttgtcaatcactccggaattgatggtttgtgtattaaaaccccaccatccgccaatagggactctgataagagcatcggtagttctttttttatacacatcgattgttgcggttattcggtcattaaaaagccccatgtccaatccaatgtcagtctgagtggtttgttcccattttaagtctttattggctaaattggcaggttccgtaccattaacaaaatttccatcgccaatagttactccccaggctcttaaggttggcatgaaagcataatctccaataccatccgctcctgtaacaccatagctaactcttaacttaagatcagagacagttttggagttttgcataaaagattcgttagatattttccatgctactgctcctgaagggaatattccgaaagagttattgcttccaaaacgggaagaaccgtcttttcttaaggtaaatgcagccagatatcgatcactgaaagaataatttagccttccaaaataagaagtcagctttgtttcgattttttcagtctcgggtttcaaataaaccgctgctgcgtcaaggttgtgataggttaatgcatcgttagaaaaaccggttccggccgctctcaaaaactcatacgtatctttttgattcgacgtaccaatcatggcactcatcgaatgttccttaatattgaatttataagttaggtattgctctgtactccatctgaaataagttttgttttcctcagatcctgatccttttaaagcagctccagccaccaacgttcttggggtgtatcttccttcaatattttcctgccattccgcacccgctccaaaatgataggttagtcctttaatgatttcatagtccaaaaacatatttccgttgaccaatctgttgatgatatgatcggttggttctaacaaaagtgccaaagcattgtctttcccctgaaatttgtaataagaaccgtcgggattgtaaattggaatagttggtggggcggtctggatagaaaacagtggggataaaatattatctccaaaatcgctattgtttccctcactggcagctccgtaaatgtttgtaccaacgtttagtttgtcattaaatcttttttcgcctcccattctcacactgtatcttttaaaatcagtattttcgatagctccggtttgtttgatgtagtttccggaaaggaaaaatttagaggttttgtcacttccgctaaaagtaatggttctgtttagtacttctccggggcgtgttgcggctttaaaccaattggtattggcaacagggaaatcggaagaaaaaacaggaggcctgccattctctttcgcaatagcattttgaatgtcggcatattgctgtccgttgataagagaaggttccttgataatgctttgaaaaccatctgagatttcggcttcaatctgcatcttacctgattttccttttttagtcgtaatcaggataactccatttgcgcctcttgagccataaatagcggtcgaggaggcgtcttttagaatttgaatgttttcaatgtcgtttggactgatagaggctcctgtactggtaatgaaaccgtctacaacatacaaaggcgaattagaattgttaagagaatttccacctctaataacaatcgaaggattggttcccggagcgtagctgttttgctgcacctgaactcccgaagcacgcccttgcagagcctgaccaacattcgaaatagtacctcctaagtttaagttgtctttgccaatagaactcacagaacccgtaaggtcttttttcttggcttttccgtatcctataactatttcttctaatttttgtcccgcctctttgaggacaatttttaaaggcgagcttccaacggttacttcctgatcttccataccaacgtaggaaatgataagtttcgttacattatcagcgacagtaatggcaaaacttccgtctgcatctgtctgcactccggtacggcttccttttacaacaacatttgctccggcgataggaagtccgttttgatcggttactttacccttgactgttttttcaaaaaagaatgcaatatcagttctgcgatttattcttacggctgaggttgctgaaacctggacggtaaaaacgaatactaaaaaaagggtgagtttaatctctgtaccgtgaagattttttagcctaaaatcttcaggtctttttttggttaaaaatttcatacttaaaaattgagtttggttaatgtttatttgttttttttcgtttgtaagcttttggaattcttttttgagataatttttgatttataatttatcttctgacgaaatggtttaaaaacaactgccgttctgttttactctttttgtatgtggtatttttttagtttttctgtttttttggggaggtgaaaaacgactgaaaaatgtattaattaacttggttttaagattattatgaaacgaatctatagattatatttttataaaacaagaaaaatgaataaaaatgtgctcgaacacattaaaaaaatgttctcgagcacatttttttgatcaaaacatttttttttacttaaatttgtgtgattttaatggaatagggcagaggctgtgatatttgtaattttgatatattttttagttaaatgtgtttttgttgatatatttattctgtttttgttaaaatatatattaaattgttagtaaggacctttgtttgttgagagctgaaaatgacttttaaggtctgtttatgatattaactaaaagacgatgttgtatagaggtattttgattgttttttgagttaatatctgattaatttggtttgtagttgtgaattgtaaataaaaaaggcgtcagatgaattttcaaatgacgccttttattataaaatactattgcttatttctgattgaactttgctttgaatttatcattcagtttggtttgaaaagtttctaagttaatctttcttccctgaatgaaagcagttgttaacttattcgttctcatgtcgagtgcatcaccttcagagataaataaagtggcatctttacccgtttccagagttccgcaagtagcatcaatacctaatagttttgccgtattggaagtgataagctgtaacgctttctctctgtctaaaccatatgctgcacaggttcctgctaaaaacggcaggtttcttacgctcatacgctcgtgatcaccactgttttcaagtcctaccacaatacctttatcagtaagtattttggccattttataaggcagatttacatcttcgtcatcgcttgttggcatgtcatgtacacgtcttaagaatacaccaacattatatttttgcaaaacatcagcagctttgtaggcttcaaaacctcctacaataactattttcctgatctgattgcttgctgctaactgaatagcatcaacaatttgtttttcttcatcagcatggatgtatagcgtctgagttccatcaaaaagcccttttgtagcttcaaaaacaatgtttctttcttttgaagcagcctgattgtaagcttttgcgttactccaaaatgctgcgatttcttccacttgttttggataatctttgttggcttcaataactcccggttcaaaccatgatcctgatcttctgaaattagaagggaaatcaagatgaattccgtcgtcctcctttataatcgcatctttccagctccatgcatctaattgtactacagaagaagttccggaaattctacccccacgaggagtgatctgagccattaaaatcccattcggacgaacagtttctactactttcgattcagaattgtaagcgatgatacttcttacgtttggattaaaagttccaatttcttcctgatcgtctgacgatttcacagcatcaatttctaccaaacctaatgttgcgttagccacaataaatccagggtaaatgtgttttccactcgcgtcaatggttgtgtcataggcatcagcagcaagtctcacggtcgttgcgtctgctaccagggttaattttccgtctttaaatccaacggcactgttttgaataacacttccgttacctaagtgtgcagtagcatttaaaatcaaaaccgatttggtttgttgaggtgccggtatttgctgtgcttttatttgcaatgatgcacaaaaggcaagcagacctatatatatgtttttattaatcatgttatctgtttttatctttatgaattttataaagccgttattattgttctaaagtatcacagtgatattctttcttctctttttttgttggtggctgtgtgctcattcctttgtttttttcctgcaacatctgcccaatcaataaacttctttctttagaaatagcctgttgtttttcagcatctttttcaagatcaaaatacactacaccttcaatcattgttttttcgactttagcataaatagacaacggattttcgctccataacacaacgtcagcatctttacctacttttacacttcctactttatcgtcaatgtgtaataatttggcagggtttaaggttacaaatttccacgcttcttcttcagagatgtttccgtatttcactgcttttgcagcttcctgattcaatcttcttgacatctcggcatcatctgagttgtaagcaaccactaatccctgattgtgcataattggtccgttaaacggaattgcgtcatttacttcaaatttataagcccaccagtcagagaatgtagaagctccaacaccgtgttctttcatcttatcagccactttatacccttccagaatgtgcgtgaaagtattcactttgaaattgaatttctccgtaacattcatcaacattaagatctcagattctacgtaagagtgacaggtaataaagcgctctttgtttaaaatttcagcgatcgtttgcatttctaaatcaactcttggtgcttttccttttttagaacctgcgttgaattttttccagctttcatcgtattcttttgcacgttggaaataatcagtaaaaacttgttcaacacccattctggtttgtggaaaacgggtaggattatcaattccccaattcgcttgttttacattttctcccaaagcaaatttgataaactttggctggtttttgtacaacatttcctctggtgcagcaccccatttccattttacaatggcagaacgtcccccgattgggtttgctgatccgtgcaacaattgcgaagtggttacacctcccgctaagtctctgtagatattgatgtcttcagagtttacaacatcctgaatcgtaacttcggcagtcgagttatgtcccatttcgttcaccccttttgaaatggcgatgtgggagtgttcgtcaataattccgcttgtgatatgtttacctttggcatcaattactgtagcagaagcatctgaaagatttttacctacagcagcaatttttccatttttaattaaaacgtcagtttcagttaaaataccttctttttcgttggtccaaaccgtagcatttttgaatagtaaagtttgagcagttagtctttttgagtcaccaaaagcaatatttggatacgttgtcgggataatcggatttagtttttcaactttagtcgaatcttttacagcgacaaaagggcttgtttttgtagcagtccagaacaattccgttccgtttcctaaaaccgcttttccggataagttttccggtttctcgatcaatccggtcaaacgtgaaaaattagatttgattgaatcggttggtttaattaaaagagagatccagtttttagaaacagtaaaagtactgctcactttctttgcatctgcggttgtaatttcagatttcggagcatcaactgttccttcgattttccatttgtaggtatctgttccaaccgttaagtcgtagttaccacggatgtcttttgcgttaacatcgtttacaacgtatttagttccttgtacccagttttcatataaaaccgttttttcgtcaaaaatttcacctgaagtaatgatgaagttggcaaaagctcctgttttcaaacttcctacttcattactttttcctaaaatagctgcgggaactgtggttagagcttccaaagcttttgttttatcgaaaccatatttaatggcttttagtaaattagttttaaaatcttcagtcttttttaatttgtctgttgttaaagcaaaaacaactccattatccgaaagaacttttaagttggttggcgcctgattccagaaacgcatatcggccaattcgatttgattggacaaataaggattagaaacatcatacgcctcagggaaactgattgggatgatgtacttggcattggtacttttaatttcttcaattctttcaaactcatttccgcttcctttcagaacatagtttaatccaaattctttggcaattttcgctgctcttaaactgtttaatttgtcttctgtagcaaaaatctgaaccagtttttcgttatcagctaaagcctctaatgataaatctttagtttctgaatttcctttcttgtaccagtctaagtccagatacatttggcgtaacaaagccgtcatacccattaacgaacttgggtaagcctgattcgtcagagcacttcttgtaaaagcaaaatgattggttactttattggcaataatttgtttgctgttttcggtgttgtttaacgctactaaaattccggttccctgagcaactccgtcagcaatatgggttcctactactccaaaaccggcttttagtagttcctcagctttcggttgatcgtatttaaaagtttcataagtatttacttccggacgaacgctttcgttccagtagtaacctacttttttagtgtcgtataaagggctgcggtcacgtccacgtccggcaggggctttaggtttttcaaccccaaagctggtgtagatatcaataaacgaaggataaatagtttttcctgcaagatcaatggcaacgctgtttttaggaatggtgatgttgtttccaacaccaaccactttgccatcctgaatgagtaaagttcctttttcgattttttgtgtcggggttacataaatcgtggcattggtaaaaacagtgtaattgttgtttttgttgtggacactttcattaacgggaaagtaatcttgagcgtacgtttttgttaaaaaaacactcaaaaacagtagtagtagttttcttttcatggataattaataaaattttcattaaaaataggaaatattaatatttgagcaagttttaatgaaaattaatttcttatattccatgttaaataccaaaaacgatttagtaattcttctgattttgatgttttacactgtttttcgaatgctgcttttaaggatatctttttattttaggatcttctcatatcgattctttatcccttcgagatagggagctttgatttctgtggcgagttctaccgctttttttaagaccgccgttgcagtatctttttttccgttttgttctaaaagatcaccatattttaaaaaggctatcggagatcttggatgtaattctgcattgctttttaaaattgattctgcaataaatggttttgtaggcgtataatcagacgacaggttagtaatgtcctcttctgtaaaccaatcagattcaattagtttttttataatggtttgaatttgctgatccatttttactaaatcagcttcgtgtaatggttttgtttgctggtcaaccgtagattgtaattccaaatagagttttttggattcggctgcaattttacttcggtagtcctctgctgctttttttgccaattctatggttttgtcgtaagccagttcctgggttgttttgtactcagggattacaccaattccttcccagtttgttttagtgattggatttattgcagttccggtaggaatgaatatttccaaaagagggttaagttcaagaatttcaccaggatttgctccgccacccgtaacttcgccaactaaggttgctcttttttgtgtttgcatgttataactgaattcttctgcacccgaaaaacttctggcacctgtgataataaataagggaacatcgattctttttttgccgttaacttctgtaactctgaattcttccgtaaagttgtcttttctaaagtataaggtattgagcaatagaggttctttaaaaaaataactacacaggtactgcacggttttaggacttccacctccgttagttcttaaatcaataacaatggcgtccgttttagaaagcaattgcatatatgaatcaatagtggggttagtttcgtgtatgaaatatttaaaattgaggtaaccgatattaccgtcaagtatcttaacctctctgaaaccatcggcgagtttgcgattgtcagttaaatgatgaagataaatttcataggagtctttagctgcatttgggttgttatccggaacaaatttaggcttgactctaagatgtttgtcgttgttgatgaggcggatttctttcgttaaagctacagcgaaagaatccagtagatcgtattttttgaatttattttctttgtaacttttttttaaatgagctgcaatcagttttgcctgatccggaaatatgtactccttttgaatgagggaatccatttttaggatagtttcttttttgaatttttctgttattttcttttgctgaccattggcgcttgggagaatcaggcaagtgagcacgaataaaaaaacgagtttgttgttaaaaataaaaatctgttgtaacgatggtttagtgagatatttcataatgttaggatttttatttataacgctaatttagggctttatgataaatgctgatgaaaatatttacagatgtgttgttttgtcattttttgttaaccaggaattaaaattatttgagactttagtaatgatcaatttgagatgatagaattgaattaaaaaggaagtagaagggaaagattttttatttgtaataaaaaacttacttttgtgtttttgtttgatttaaagcttttttaggaataaggattatgttagtaaaagtttacggaagcgccgtttttggagtagaagcaacaacgattacggttgaagttcatatggataatgggattggttatcatttagtgggattgccggataatgccataaaggaaagcagttatcgaattgccgctgcgcttaagaacaatggattaaattttccaggtaagaaaataacaattaatatggcaccggctgatttacgaaaggaaggttccgcatacgatttaactttggcgatggggattttggtggcttcagatcaggtaaaagcaccggagattgaaagatacattatcatgggagaactttctttagacggtagtttacagcctattcggggagcattacctatcgcaatcaaagcaaaagaagaaggttataaaggtttctttctgcccattcagaatgtcaaagaagccgcaatagtgactggattagacgtttatggagttgagaatcttcaggatgttattgatttttttaatggaaaaggaacacttgagcctacaattattgataccaaagctgaattttataaaagcttagatttcccggaatttgacttttcagatgtgcgcggacaggaaagcataaaacgttgtatggaaattgcggctgccggaggtcataacatcattttaattggtccgcccggagcgggcaaaacgatgctggcaaaacgtgttccgagtattttaccgccaatgactttgcgtgaagctcttgaaacgacaaaaattcacagtgttgccggaaagttaaaagaagttggattaatgaaccaaaggcccttcagaagtccccatcatacgatttctaatgttgccttggttggaggaggaagttatcctcagcccggagaaatttcgatggctcataatggtgttttgtttttagacgaactaccggagttcaaacgtgatgttcttgaagtgatgcgccagccgctggaagatcgggaagttactatttcaagggctaaatttaccgtaacttacccttcctcgtttatgctggtggcgagtatgaatccgagtccgagtggtttttttaatgatcctgctgtgcctaatacatcttcaccgcacgagatgcagcgttatttaagtaaaatatcaggacctttgttagaccggattgacattcatatcgaagtcacaccggttccttttgaaaaactggccgatgatcgaaaagccgagagcagtgttgaaatccgtaaacgggttactgccgctcgggaatttcagaccaaacgtttcgaaacaattgaaaatgtacattacaatgcacaaatgagcagtaaacttattcgggaattttgtattcttgacgatccgtcgaaagaattgctgaaaaccgctatggaacgattgaatctgtcagcaagagcctacgacagaattctaaaagttgcccgaacaatcagtgatttggatcattccgaaaatattatttcgtctcatatcgccgaagccattcaatacagaagtttggatcgcgaggggtggctgggataattatcttagatttgaaatgtctgaaaacaaaagaagaagaaaaaattgctgtaaattttacgatttgaacttactcaaattttaaacttgagctttttgacattaggtaggaggtgagttttttaatttttcctttttccatttcaaaaacatcgcagaaaacagcatccagtttattgccgtttttcatatttccctgtacggcaccttcagcaattacaatgtcattttcttcaattagttttatgatttggatcgtgggactaccggtaaaattatcgttttcaatttctttgtcaaaagcttcttttcctacatgttgataaattccgggcatttcccaaatcacatcatcagtaaggcaatctaaaattcgtttatgatcgcttaccataaaagcttccatatattcggttacggtttgtttatttactgtcataatgattgcggaatttttaaactttataaaattaaagtatttattgtaaacttttaatgcttaattggtatgtattgaaaattacaggcttattttaagccaccattttattgtacttattttgtcaagttctaactctgacaaactctgatcttcaattttagacaaggaatttttcacagtttcaataccataattatcttttagccaaaaggggagttcttcgacacttttattccaattttttaaaattctcttcagaattatttcagagtctatcgttgtttttggttgaagcgattttagaattaagcccgcgtatttttggtctgtataaatagtttgatccctgtcttcattttcaagaattaagatgataccttcaataattatttcatcattaacttttggtaaaagttgaataaattggcggactcgtaaatctccaatttggttgataagatcaatcgattttaacaattcgtttttaaagtcttccgctgttgttggaaatttcatttttttaataatggtctgatgaaaagagcaaagatgaatatatgcttattgttttttagaaacattccaaaagctgatttttcgtctcgttacaaaacctagtttttcatataagctaatggcacccatattattttcgacaacatgtaaaaaaggagttttattttcgtccaagatgttattgacaacatgcgaaatcaattgtttggcatagcctttcccggtgtgatcgggatgcgtgataatagcactcacttctgtaaagtcattcattttcatacgttcgcctgcgacagctatcaattgggcttctttaaatattccataataattgcccaataaaggagttttggttttaaaatatcccggttgtaccaaattaaccagttgtaataattcggcattatgactttcggtaagtctgagaatttcagtaccaatcgcaagttgaattttgtcctgaataaccatttgcagacaaatcaattctttgacgattgtcaaagaatcgtctatttcaggtttttcacccactataaaaaaagaatccgttaacaacgcatattgctttgtggccgttaaagtgctttccggtactataaaacctccaaacggacaataatccggattgtaaaatttagtaccatcataatcaagggcaaatgtggaatgtttttcggataatgcatgccaaaccggattatctagtttatggtcttctttatttgtcattatttaaaaaataattttttgggatcgtactatattcggtttttattctttctcttttataggatagaaaaaacgaaatgagttcgaagctgccgggtgcaaaatcgtaccgtgattttcaagcgggaaataatcgaaatatactcttatgtttttactttttgaagctttaattttttcggttagtaaattagcatcgacttccataactcttggaatttcggttggtgtaagtccttctttacccactgcaatgtaaatgtctgtttgcggactgaaattttcctgaaaaatagggctgtcgagatttagtatagaaccattattccaccaaatgcttgggcttacaataacatatttattaaaaagtgtcggtttttttagtaaaatttctgttccaagtaatcctcccaatgattgccccataagggttttagaagtattggctttgtattttttttcgataaaaggctgcaattctttttcgataaaagcaataaatttatcagaatgaccggaagtcggaaaccttttttgatctttttcaatagtggtcgggaatgtaaagtctcttcttctgtcgacagttgcgattcccacgacaatggatttaggaacctgattgatccattcaaaactattaaactgtaccagaccggcgatatgaataaaatcttcatcggctgaaccgtccaataaataaattacaggatattttgttgcctcttcggctttgtaaccttccggaagataaatattgagaattcttttttctcctaattctttcgattgaatttcatcgataactcctaatacaaatggctttgcagtttctgttggtttgactttattagtttggcaaaagataaaagtggtggaaaagaataaaaagacaagggtaaataatttgttcattatggtgttatttagtagcaatggggtaaaatattatgatgtgaaacaggaaaattatatagaaccaaaatacaaatttttgacattccaaaatcttaattaagaagaaaaaaaatcaaaaaacgactatagaataaatccctttcatcaaataatgaaagggatttaataagtatttaatgctattgagttattttagaaaaaggaatagcctagtatgacagatgccgtagtgaatgaagagttccaggcaatgtaatcttttagaatagttctgccaagttggtatcttaattctatactgtacttgtcgcgtaattttccgccaattcctaatactgcactatttccggatttaacatccaaagtattaattttagatccatcttttctggtgaattctattttcgagtttagaccaaaatcaaatagtaatgataatgaagcattcgcaaagattttaaaatcattattaacaaagaagtaatgtctgattcctataggcagctctattgatttataatctacttttgcgtttacttcggaacctgccaaattcgaggttgattttgacttttcgccactatagtactggtatgaaggttctgcaattatagcccatttatttttattaaaaggtaaaataaactctgcttcgacacccagactaagacttgtcttagaaccaaatttaacattgtaaaaatctatattcgaattgttaatcgataacgaactgctatttaatcttggtctaatggtcaaattaaacaaatcctttttttcttttgtttcaaattcgacaaaatgagtatcgctgcacttgttatatttgatgaaaaatttgaagagctgcttgtaagtgtaatccagattttcgtattctctctgaaggatattatcgcattttagatcaataaaaagctgttctctgaagtaattgtttttcgcaatcgaagagttttcatttaccagataagttttgtaaataagctgttttatttctgaattatctatcttataaaagaaacggcttgagtttccttccccgtaggagtaaagtgatgcctttccttcaacatgcacttttaagaagagcgtttcttcttttaaatccggatttttatccgtactcatattttctatgtatcttgaggagcggtctatttttactaaggttttgatgtatttactttgtcctgtgattgcaaattcttttacaatttttaagtcagcaataagaatgtctttactttcaggtagttgatatctaaaattggttggagtatttttccaatccagattttcaattaagcaatttattttctgattgttttggttgatgaagtaaccgttttcaaaagttatttgcgaataggtgtttaaagttaatataaaggctaatacaagtaataagaattgttttttcattaaaattttgggctgttatttagggttgtttttttgaagagatctttttttgacagcaaatataatatacagaacagttattgcattacgtgaaaccgtaatacaattgattatcgtttggaagaatgtgagagtgattgtttacagattgtaagtatacgcattaaaattaaaatgagtaaagtattttttcggtccaaattaatacccaaaaaaatgaatagttaagtgtaaattacttcacttccgttccttcaaactttattctgcggtcatttacgtgaaccaattcgtcaagttcgtagatatttttatagccatacccataaaggttaatatgtgtaggaatgttgagagccagcataacaggttttctgttggctaaaatctgagactcgggagtatttttaggaagagccatttttgaagcgaaatctatcgggtcgccattaaaattgttattacagtaaatcagtatcctggtgttaggatccggaattaattgatgaagattttcctgtgtaaaatcggtaaaatcgagatgaatagccccttttaagtgttttcggttgtaacgaaaatcagagcgtgtgtccaaaataacagtattctcttcatgactcattttaagaaaaagatcgagattcactaaatgagttgctctggctttttcgacttcggtaacgaggtttttaaaatcatcgtaatcgactagtgcttttggatattgttgctggtttgtcattgcggtaggggttttggccgtttgagactgtgtgacacagcctgtaaaacaaaatgatactaaaaatagaagggttatctttttcataatgaaatgaggtttatagttcaatatgtttatcagcaggactctaccgcttttactaaaacgttagatttatctcctgaatttgtttctgacaataatatcttttaatctctcttttaagtcttctcctgtgtcaaaaaccatttgttcattgttcgggaaaggaacagcacgtttattgaagtagttgatataactgtcttcacaggcacttctgtctcctttgtaggttgagtaaatattctcaaaaataaactcactgcttaccggaaaagattgtagtaattgattggtttttaaatcgacataatccacttttgctgtgatctggcaggatttaaattgtctgaattcgtatacgtttgcacggagcattctgtaattgtctacttttatttctctgcccagactgtctttaaccggtcttcctctgctgtccagaagtgttttgacaccgtcttttatctgtcgttctttaatgaattccttctctttgatttgctctggtgaaatattgatttgcacgaagtttacaatcagactataatcgtaaacgatgcctttttgtcttagactgtggtaaaccgtccatttgtcatttaatccataggttttaaaatcgagtaagtcatcctgaagcggtttcggaatgaccatattggtttcgtttttggcataaacatctacaaaatcggttcctttaaactgtgcatcttccatcagttttttagtgtttttgtagtttgggctaatgctttccaaataagaaaaatcatcgtaggcttttctaaaatccagtttgttatttgattttaaaagggcagaagcattttcatataaatatctcgtcaatgcaattttactgcttatgatctgattgctgtaattatcaaactggaatgtagcggttcttccttgtttcaagagttgcagaggcaataaaggtctgattttttcctgacgattgttcaactgcatgtaggtattgtaagtgcgttcggcatttaccggatttgcttctttgatcattaattccaggctacgcaaatctctgtctttggcctttgcgaaagcctcttccagcaaatacacgtaatcttgttttcctttagaatcttttttcgttcgtaaagcttcgaccgcacggtctatcgctccatcgtaatttccatcgctgagcatggattgggtagtttttacaccacaggatgacagtgctaaaaataatattaaaaatagaagcgtaattttttgcatgatattttttaattgaaggtgtaaatatatcttttttaactttcaacaactatgccttttttaaaattattttgtagagtagataagggtgcagctaagccatatttaggtgcttaagcagtattattctgttaacagttttttgatcaagacaatttggcctaaatgataataactgtgttcgatcatggcttcgatatttcttttgtaggttccgtatttttcgttgacaaagatctgatccagtttttcgttgggcatttcttctacaaaagaggcaaattcctcagcagaattccagaatttagttagaaaagcctgccattctccctgcgaatgaataggagcgaagtcaaagctgaatttgtcttttatatccagtgatccccctttaaaaacactatttattccactaatataatagtgaacatgctgcgccaaaagtgaaatagtattaatgtttttgacaggagttacagcaattttccaatccagattttgcagctggtctttataattggtgttggcaatccaagttccgtttaaaatgacttctctaaaacgattggtaatttctgctgtacttttcatattcaaagtagtttgaatgttatcgttttacttattatactcaatagttcttatttttaaatcgctcggctctccatttaatgatgtctttctttcaatccagttgttgtacttatcgtatttatattcataagtgtaaatagatgtatgaaaaggtttgccatcagtaaacatttgagttttttgcgaaataagatcaccaaaattattgtatgtgctttgtactcttttatctgtcactccattgttatcgatttcggcttcatcctcaatttgatttcgagtattatatttaaagacaatagatctttttgagatatctttattgtagactttaattgttgctattttatcatttttgtaaaattttctttcaatataatcgtcagtctctcgtctgtaaataagatttccttcggcatcatattcttttgtgcttttctcggtggcatttttttctacataatttaatagaaaattataatctaaattttctacaagcagattttctgttcgagcataactataattaaaaatgtttttttcttcattattaattttttgaatagaatagatctcaatgctatttatgcctttattatactttatttctagtatatttttatctttatataaatagtcaacatttactcgtggcttacctgcagcttgttccagattttctatcttaagaagtcgattatcttgaaaaacaaagtctgtgacttgtatgccattgttatattttgtgtaattattattttttctatttttctctgagtagttggttataatttttaaaagtttgcctttttcaatttgatgttgaaaaccatgccccaaatcctgattgttttcaaattctatagaacctacaagagtatcattcttaaatatatttgctgagtataaagaatcttctgttatgccgatgaaacttacatatttatgaacttttcctttagaaaaatacattttcatatgagacgaatttgtcttgttgaattttttataatagtaatgtaatgtattttgaagaattgtgtttacattatctttgtttttgagactttgagtttgctcttcaataagcattatataatcattagtcaatcgtcttagtacgtcatcgtaaataggatattcaggaaactttactttctgagctataatgggcattgtaaaaagaaagaagagaaaaattagggttttcttcattttgatttggaagtttttgtttatagtgagcttgatttaaaattggttattgtttttaaataacattgtcgttctattcctgctgaatccactcgtattttccatctttaagatagataatgccgcctccgcagctttcttcggcatgaataaatattccgtcatttggcaatttgattttatcctcttcttttatttcgtcatcgcccaaaatttctccctgatcgtttacattgttccaaacaacttccccttttggggctttttcgaatattccggcccagtcgatttcttcaaaaccctgatagagaatagtatttcccattccgaaataatctgttcggtttccgtttccgaaaatgattcgtaaaccgcttttatcactttttgtacttcttacaatttcaaccttttcattttttccgtcaccgtcaagatcgcatacgattttatttgttttgtgtttggtcgaaatcacaatagtatcggagctattttgtgtttcttttttctcagtggtttgaacgtgatctttcgcttttgttggcgttgttgtaatttcggtttttgtttcttttttacaagagatgaaaataaaggctgagagaagtaaaagtttgaatttcatgtttttagatgatgattttggtatcgtttgaagttgccaaaatataaatatttgggcacagtattgtaaaagtgttgtttgcagcaattttaattgcgatagatatcagttgggtgaaatttgaaaaaatgaatttaacacatagaaacatagattttggttgtaataaagagagccgcacaaagaaatatatttctttcacatagaacaagatatgtgcatttaaatgtagtgaaacgtcttttttatagaaaatacattgcctatgttactatgtgttaaaatgaattacacccaataggttttatttagttttctattattttctaattttcacctgatatacaatttcccaaaagaggattgatagaatagcattggtgaatatggccgttttaactaaatagggatcgtatttggtaagcagatgtaagttggcgaactgtacggccaaaaatagagacaaagcagctattaccacagagcagatcacatttagtactggtttccactttaaacctaagaaagaataaataatgttcaaaatagcaaagccacaacccaaagtaaggtaaggatctgttcctaatttctcacccaactgcagtaaaggagaagttgcggtaagatataaaaagaaaaggattgcataaaagagcgttcgtgtttgaattttcattttgatgttttttgatgttttttgggaataaaaaggagttttaaagaattaaattagccagttatcatttaaattatccttttttactcatgtgaagtgcgattctgtttccctcacagtctttaaattctgctacccagccaaattcgccgtttgaggttatgggaaataaaatctcggcaccattttctatggccagatctatagtttcttcaatgttttcagtgtttaaataaactagagttccgtctatcgtaggtttgtatatttcaccttgggctaaggctcccgaaataccattgttgccttcgataagcggaaagaatgccatttcattatcatgaataaactcccgctcaaattcaaaactaaaaaccgccgaataaaattgtatggctctttcgatgttggttaccgggatttcaaaataaacaacgggatttgatttgtttttcattttgtttggggctatttttttagtgtaagcgaagttagagaaaattctagttcaattgactggattttattttttcaatttgtcgtttgtgtcgaaggatatgtacaatcgcatgttctgtaagttgttcaatgtcgtacaattgtccccaacctgtttttatttttagtgaatcgtcaaattgttctaattcgttgtctttaatttctcgaaaaacattttcggtaaagatgaaaacattcgttaaatctatcagatattcggcaatggttacatgaaaaattttgcctggccgttgcacattctgccctttcaggttatgaatactgatggcatagctataaccggaacttactacgtgagacagaattttttgtatggatttacaatcttcgtctgttgttttttcgtctatgattttggtcaaagcatcgtccggaatacttttgataacgttggtaaggtctaaaattgcctgttcgtagatgtcaagcaatgctccaactgctccttgtctgttcatttttgtgttttgttaattatttttgttgcaatttcagaaacttcttcgtcgatttcatctttagtcgggtcttttgcgattctttcgatttcatttaaaaccatttgatctttaatgatctctccaaaagtatcaagaatccaatatttccaaacctgatcctgactttgtaaaattttcaatatttcagaagaaattttttcacagtaaggaatcagaaacgctgcaattggtctactaactggccaattcatatcctgtaaccatttaagtaaatccggaataatagactcgatctcttcaaatgagtagttttttagtttttcgactgtttcgaaatcaaatttatcttttgggattaaatttttgacattcatattgctcagatctgttagttgaattttgtattatatattgacccttataaaaaagcgttttttttcatttgttttcttaaaaaaagaacgattaaaaagaaaataaaagctaagattgccaatcttgaagcatttccggatgcactcattcgtgcctgatgttctctgccataaggaccggaatgttttatagatccgagaacaaattgcattttttgaaaatttgatttatcatttttaggatcatcagaaaggagaatgttgatccagcctttttctcccagactttttgcttcaaacaatgttcttccgaacatattatatctggcaagcgagtaattttgattggcgttaattattaaggtatcgcatttgaaatcttcggcagtaattttatttagcattttcagcacactttctgatctttctgcgccagctcctggattttcataatattgatatgcaattgttggtgtttcgccgattgcagtagagtctgtgaaaatttttccattctcgtaaaaagcatcataatttaatcccttattttctttttttatttgcgaaaactcgctaggaacctgaaaactgacatctcgcaattcgattttgttttgagagtagaaactaattgttgtgattaaaattagtaaaaaggggtttttcatagagagctgattatgatgtaaaaatgtattaaggagttttgaattgtagataaactctgtttttttcttattgtaaaatagtctctattttggtctctgacttttctttgagaacactgtcaggatgaaaattccagataatcagaaattttccttttgcaagatattcttccggacgttcgtcagttggctggccgtcttttccccaaagtaatccttgcagaaacctatcgcctttaaaagtgtgttcaaattcaaaatacattacagatccacgatcggttttacttttaaaattttgaatcgatttattttttaaggttccaacaatactagcgtaggtttcgatatcattataaaaagtacaggcttgcggagtaatacaaatattaccatcgtttaaagtgtagcctttgggaatttcttttggttttagttttagatcagcaattgtctgaccgaataaagtagtagtaagtaataaaaataataccgacaggggaatcgtaattttcatgtttttatgctgttaggtttgttgagcgaaaatagtttttttacttttttcttactttaacttctttctctttttcgtcataatataaaagatctttattttttttcaaaccaagatctccacttttttatagttttatcaggcggaaatacaggcatatcaaatgcctcttccattttgtaggtaatgccggttatatctatcaaaaactttcgagcttcgtaaaccatgtttaaacttatcgattcattttcgtttttagataatctttcaaatgattcgaggttttccagaaagattgcttgaggattttgtgcatttactttgtttgtaaaggaaagtaaaatcagaaataaaataatggttagttttttcataggttagtttataaaaaaagcacaaactctaaagatatttgtgctttcgtgaaatttatatttttgagtaattattttcctttatacaatttttccaaatactccactttctctttttcagccagaaccaaacgttcgtaaagttctacaactttgtctagtgggttgaaattacaagaattgttagttataaagctaccagtaacagattcgtgaaaagtattgaagtaattgataacattctcttccgaaaaattttcaatagcttcaacggtaacgccaagtacttttgcaatttctgcaagttttgcggcttcaatcgtttcactcgcctttaaattagaaacagattgctgacttacgccaattgcaattgccagtgcttctggtttcatacctttaagctctcttattcgactgatgtttcttccaatgtgttttggttttgttgttgtgctgatatttcaaaggtatttaaaattattttataaaatggtgcctagtgaagcatatgtttttttggttagactagtttctgtctattttggcagataaataaatgttttttaggatagaatagtgttttaaacataaataatacggatttgaaatatgtctaaacaacgatgagaaaaatagttttttgttattttaattaagtaagttaatttgtagacaaggattgtaaatcaacgctatctgattattaaggtaatattttaatcaatgaattcctctatttttgtttcaatatatgatatacaaagtctgaatacgtccatttcttcttttgtcacgtccttagcatgtgcatctgagcgaaatttatttactacttgcatcttatgatcaaaatcatctttattacttccgaatatatttttaaagatatcataatgtttaatgattgttttacgaatatcctcgaaataaatttcacaatctcttgcgttaaaaagttggctataacttagcccagagtattttgtttttctgggatctccaagtaccgctaaatatttaacagtagcatctgcttttcctaaatgtgctaaaagttgatttctagctatttttctaagtttgggttcaattgaatttcttctttcagaaatttctttataacgttctttaggtgaatctaaagccttctcatatttatgtttagttaataaatagtctttaatagcatcaattttaaatgaatagtggtcattatttttatcgataattttatagcctaagagatgatttgtaaattcaggagaaactattgctaattcattaaaagttttcatatcatcaagtgcaatatattttaacatgtcaaattcagatggatagaaatttttaagtacacctaaaatcatttcaacataactactaaactcactatgaaatttagctttagctttttcataaagatatttgtcaacccttataggcctttccgaatcagaaatcttgttaataatactgcaaacatgtcttattaaaaatggatgcccaccaaaatcttcggtcagttttgaataaataatttcttcaaattggagccccattattctacctaacttccttaccatttctcttgtttgaggtacatcaaagttagggatgtattcaaaataaatttgattaaaaataggattatctttaccttttatttgagcagtctcaatagcattcggatttgtaccaacaataaaaaatgaaaataaattcgtgtttttctgaaaaacggttcttatagattgccataataaaacaaaatctaagtcattagtccagtgttggctgggtgatgtgttaaatgtaatattttcaatttcatcaaaaacaattaatatacttttttccttcaacttttcttttgcttgttttaaaacgctttcgaattgtaaggcagcattaagttcagtgaattcaatctcctcttttattacaagagtcggacatacttgatttttaatttcttccaaaatataccataaagctgaattccatcgtcttttatgcattgatgggttttgacaatcaataaatacagtatgttcaccaagagagtctaaaacccttttaacgccaaaaattactgatgtcttccctgttttacgcaacccaaacaaggcggtattttcattcgatttatgtctgttaactaatttcaaaacaaggtcacttcttccaaaaaaataaagatcttttttaagtggggattcaaaagcaaataaatctcttgtataaaaatgtgctttaaatctatttcgcaaaaaatatgaatctgaatttgaaagtaattcactgtatgaaaacggaaccactatttgtgattcttggtcattttttgctaattcaccaattctatcaacaacattttcatcattactaataagtacacaacacaatttttctaatcttaaagattggtattttttttcaacaaaatcaactgcatctaatgaacgggtttcaaatgttgtatagttgctaaaaataacaatgatttcaagctcaatattgaaaagctctttgtaattatctgttggtttaattagaaagtatttatattgtgaagttggcccaagattgaactctccaccgccatttgtaatataccattctccggatattttttttattattttctgttcatcttctgtaaaatgtatcagttttacttgaggatttatacctggatatgttttttgatcgtctagttgaatcatgttattatatctgtttctgttattataaatataaagtagtttagaaaaatattgaagaagttgtgcttcgcattcttttcaaatataatattttatttgttaaatgaattttatttctaataaaaaggagagaagtacttgaatgatagaggtgatattttttatgaagttgagatgattagaaaataaaaaggaaagtcaacacatggagatataagctcaaaatattaaatttaaattgttggtatagtaggggcaacaggtttttttagtctttcgggttactatttgtaaagtatatcatttcgatcgaagggagattcgagcgatagcgaacaggcgaagtaaatctcacgcaggattcgacaaagattggcgattctctttgaggagtttcttgtgtgatccttccttcgtcaggatgacaaacgggatggttactttgcgtggacttcgacttcgctcagcctgacggggcataaatctaaaaactgtaaaaaaaaaaaatcccgcttcaattaagaaacgggacttcgatgatattctctttttttttattttaaactgttgcagcaacttcctgtggcaacggaatttgatttttaagtaaatcttcgaatgtttcgtgagcacgaatcaggattccctgaccgttcatccataaaacttcggctggtttgtatcttgaattgtagttcgaagacatcgagaaacaataagctcctgcatttctgaacgctaagatatcaccttcggtaatctctgaaattctgcggttgttggcaaaagtatccgtttcgcagatgtaacctactaccgagtaaaaacgctcttttccttttgggttggagatgttttcaatatggtgctgtgaaccgtaaaacataggacggattaagtgattgaaaccactgtcaacccctgcgaaaactgtcgaagtggtttgttttactacgtttactttggctaagaagaaaccagcttcgctcaccaggaattttccaggttcgaaaatcaacgttaaatctctgccgtattctgtacagaaagagttgaatcttttagataattttttacctaattcttcaatatctgtttcgatatcgtcttttttgtaaggaactttgaatccgcttccgaaatctaagaattgtaattctttgaaatgtttagccgtatcaaataagatctcggcggcatacaagaatacttcgatatctaaaatatccgatcctgtgtgcatatgaatccccacaatatgcatttttgtattttcaacaatacgcaaaatatgcggtatctggtgaacggagattccgaatttactatcgatatgtccaacggaaatattggcatttccacccgccattacgtgtggattgatacgaatgcataccggtatattaggatgtttggttccgaattgctctaaaatagataaattgtcgatattgatctgtacacccattgcggctacttcttcgatttcttctaaagaaactccgtttggtgtaaagaaaattttgtcaggatcatagccggcatgaaggcctaattgaacctcctgaatcgataccgtatctaagccagatcccatgttctttaatagctgaagaatggcaacgttagacaatgccttcatggcataattaactcttaagttttctaccttagagaaagctttagttaacctgttgtactgagattggattttttcggcatcatatacatataatggacttccaaattggtctgctaactgcagtaaatcttttgcttgcatctgtaaactattttcagcaaacttattactcttttgccgattgacaaattttaaattgaaaaataacaaattgtaacaaattgttataaaataaacatttaaagtttttttaacttttagtggtttctaattcttatttagagttaataaaaattatatttgccccaaaattacactattagagattatttatgaaaaagattattacattttacctgattatccttacaacttcggtgggatttgctcaggagaaatcaaaagacagtttacagactaataatttagaggatattattgtaacggcaagccgaaaaaaagagagtataaaagaggttgtttcttctattacgattgttggagcgaagaaaatccaaaatcagaccttggtaaattcgaatatcggtaatattttgcaatatacagttccgggtttagcgaccgcaagtaaccaaacttcaaatttcggtcagactttaagaggaagaccatttttggtgatgattgatggaataccgcaatctacgcctttgagaaatggaggtagagaccttcaggtaattgatccttcgtctatcgaaagagtggaagttattaaaggtgcaacttcaatttatgggaatggtgccgatggagggatcatcaattatattacaaagaaaaaccattctgaggaaaaaattagcggttcggtacagctgggtttgatcacacaacccaaaacttttgcagaatcatttggttacagagcttcactttctttggctggaaaactaaaaaaactcgattacgttgttggttttacacaagaaagatcaggagtttctaaagatgctaacggagtaaacctttcgccgttttatagtttatcgaatttaaatacctataacggattgtttaaaataggatatgcactaactgatacccaaaggttagagttctcgtacatggggtatgcttcaaagtcattcttggatcaggacgttaagattggtaaatggggagaaattccaacgattggagtggaagccggtggacgtttgggaacgcctgagggaactccgagaaaccataatttcagagtagcgtattcgaactcggagatttggaacaacacttctttggatgttaatgtttatgcacaggatttcagaacggtttattcgtacgacagagatcagtttttaaacggaggtcaatcgaatgtggcttcacaaaagaaagggcttcgcgttaattttgattcccgtctttttgctaatgatacctataaagcagagatcatttatggtttggatttgcttcaggataaaacagttcaaaagttagaggacggtcgtttttggacaccacaaatgaaaatggtcaatacagctccttttgccttaatcaagtttgatgcctggggtaaatttactttaaaggcaggtgcccgatatgaaaatattaaagttaaagcagatgatttcaatacattaccggtattaaatgccaaaaacaatacctataccaaaagtatttttgttcagggaggtaatttagattacaacgcccttgttggaaacatcggattgcgatacaatattatgccggaggtaaatgtttttacaagttattctcaatccttttcgatcaatgaggtagggcgtattttaagaacgtctaccgaaagtgtgatttcaaaattaccaacggatcctattattgtaaacaattacgaaatgggtgtggccggagcgattaaaaaatggttcacctatgaggtaaccagtttctggagtacctcacaattaggggctacatcaattcaatcagctgatggttcttttgccatgcagcgtgctcctgaaaatatttggggttatgaggctgttatgggctttaatccaacagagtttttaagttttggaggtgcttttgcctggatagaagggaaggttgataatgacaataatggatcgtacgaaaaatatattaacggatcccgaataatggctccaaagcttactacttatgttcagattcgtccgttgaaaaatttagatattgaattaagttctttacataatttcaaaagagaccgatttgacccaaatccaaccacaaatttgtatagttttaacgaaggtccggtaaaaaaatatacggtctttaatttaagcagttcttatctcattaataaatcattccgattggcactgggagtggagaacttatttaataaagattacgctcccaatattgcctggtggcaggcgagagataaagattttgtgaatgctccgggaagacgtgccactttacaaattcagtataatttttaaatttagtaatttgaagtgtaattttaatatttcataacaaagcccctttttgatttcaaaaaggggcttttatttttacaaaggttaaaggagtctgtgacttataaactaggtaaatctccgtttcctttggttggtaaattggtagagcccattaagaacaaatcgacttctcttgctgcttcacgaccttctgaaatggcccatacaattaacgattgtcctcttcgcatatcaccggcagtgaaaatgtgcggaacattcgtttggtaatttttggctttatagttgcttctcatatcgatttccagtcctaattgctcgcttaaagttttttcaggacctgtaaatcctaaagccaataaagctaaatcgcatggccatattttctctgaaccttctttttcgattagttcaggacgttgccccggagtcattttccattgtacttcaacggtttttaatcctaccagttctcctttatcgttggataagaattctttggtattgatcaaccagttcctatcacagccttcttcgtgagaagatgaggtttttaactgtagtggccaaaaaggccagggagttgtttcgcttcttccaacgggaggttttggtaaaatctcaaagttggttaccgattttgcaccatgcctgttagaagttccgatacaatcagaaccggtgtctccaccgccaattacgattacatctttaccggtagccataacctgatcttgaattgattctccaaataaaactttagtctgctgagttaagaaatccattgcctgaacaacgcctttgctttcgattcctttagttggtaaacttcttctttcggttgcaccaccgcacaatacgatagaatcaaaagaatttaattcggctacgctatagttaacgccaacatttacattggttttaaaagtgattccttccgcttcaaggattgctacacgtcggtcgataattcctttttctaatttgaaatttggaattccgtaacgtaataagccaccaatggcattgtctctttcaaaaacggtaacggtgtgaccggctctgtttagttgctgtgctgctgctaaacctgcaggtcctgagccaataacagcaactgtttttccagttctggtttttggggcctgtggtttgatccagccttcggcaaagcctctttcgatgatgtttttctcgatgttttcgatggcaacaggctctttgatgatccctaacacacatgatttctcacatggagcagggcataagcggcctgtaaattccggaaagttattagtagactgtagaatctctaaagcactttgccattcttcctgatgtaccatatcgttgaaatcaggaattaaatttcctaacggacaggaactgtggcaaaaaggaataccacaatccatacatctcgaaccttgttcttttattttatcttttgctaacggaatcgtaaattcgttgtagttcgtaacacgttctgcaactgctatattactttcgtcggctctgttatattctttaaatccgcctattttacccatgacatttttaattaaatctaaatgattaaattccaaattctagtttttaaccgcaaagagcgcaaaggttttttaaaattctttgagagtttttaagttcgcaaagctttgaggttgatttcaatctaaaatctaaaatctgaattctaaaatcatttatcccgctattaattcttctatttttttctcttctgcaattcgctgtaatgcttttttgtaatctgttggcatcacttttacgaaatttcgctgttcattttcccagtctgctaaaattcttttagctaatggactgttggtgtacagagagtggtttttgatcagttttcttagttttctcacgtcctcgtcttcgatagggtcaaaagcaaccatttccatgttgcatacccttgcatcgaattgctgcttcgggtcgtacacataagcaacaccaccactcatacctgcggcgaagtttcgtcctgtttttcctaaaacaactactgtacctcccgtcatgtattcgcatccgtgatctccaattccttctacaacggcagttgctccggaatttctaacacagaagcgctctccggcaattccattaatataggcctctccggtaatagctccgtaaagggcaacgtttccgataatgatattttcttcaggtttgaaggtggcagtaggagggacttttacaattaattttcctcctgaaagtccttttcctaagtaatcattacagtttccgtgaattttaaacgacaatccgttggtggcaaaagcaccaaaactttgtccggcagaaccttcaaaatcaactaaaatagtatcatcaggtaatccttgtgcgccataaatttttgagatttcattactcaaaatggcacctacggaacggtctgtatttttaattttaaaggtaactctggttttttcttttctgtaaatagacggaattgcttctttaatgatatcaaaatccaatacattttcaagctggtgatcttgttgtgttgtgttgtgatttggtaccgttttggctttttccggtttgtataaaatcgatgataagtctaagccattggctttgtaatgttggatcgctttgttcacatttaatttttgcgactgacctaccatttcttttaaagttctgaaacctaattgcgccatgatttctcttagctcttcggcaataaaatacatgaagttgatcacgtgctccggagtccctttgaaattttttctcaattcaggatcctgagtagcaataccaaccggacaggtattcaagtgacaagctctcatcataatacatccggaagctacaagcggagccgttgcaaaaccaaattcttctgctcctaataaagcggctatcgctacgtcacgacccgtttttagctgtccgtcacattccagaaccacacggcttcttaaatcgttcaagatcaaagtttgttgcgcttcggctaatccaagttcccacggaatacctgtatgttgtaaagaagttaagggtgcagcaccagttcctccgtcataacctgaaattaagatcacgtcggcttttgctttggcaacaccggctgcgatggttccaacgccaacttcggaaactaattttacattgacacgagcttcacgattggcatttttcaaatcgtaaatcaactgagacaaatcttcaatagaataaatgtcgtggtgcggaggaggtgaaatcaaacctacataaggggttgaatttctggtttcggcaatccagggcactactttttctcccggaagctgtccgccttcacccggtttagccccctgagccattttaatctggatctctttagcgttggtcaaatagttgattgaaacaccaaaacgtcccgaagctacttgtttgatcgcactgtttctcgaatctccgttaatttctttctggaaacgttttggatcttctccgccttctccggaattactttttccgccaattctgttcatggcaatcgctaagttctcatgcgcttctctactgatggatccgtatgacatggctccggttttgaatttcttcacaatttcagtccacgattctacttcatcaatagaaatcggatctaaattattgaattcaaataaacctctgatggtcattaagtttgagctttgctcattgaccatattcgagtattctttatagctttcaggactgttcagacgaacagcttgttgcagtttagaaatagtggtggggttaaacatgtgtttctctccaccgcgtctccatctgtaaatacctccaatttcaagagaaagtaagttggcaatttttgaatttggaaatgctttttggaaacgtttcttcacttctttttcgacttccatcaaaccaattccttcgattcgtgatggggtgtaagggaagtattttgaagtaaaggttttgtttagacctaaaatctcgaaaatctgtgccgctctgtacgaatgtaaagtagagataccaattttgttcatgattttaacgattccttttgcaatggctttgttgtaatttacaatcgcgtaatctgcttttacacctttgatgaagccctgattcacctgatcgtgaatgatttcgtttaccatgtatggattgatcgcacttgctccgtatccgaacagtaaagcaaaatgatgcggttcacgaggttctgcagattcaattatgattccgaattttgaacgaacctgtaaaatattcaaagagtgatgaatgtacgaacaagccaataacattggtattggagccagttcttcgcttacgcctcggtctgataaaataatgacattgcatccttcagaaacggccttaaaggtggcctcaacacatttttcaagtgcacgctccagtccgttaactcctttttctattttatataaggtagaaatagtagccgatttgaaatcaacgtggtcaatgtttctgattttatccaaatcctcgttggaaataaccggattttggatttttagttttttacactgcttagattcaatttcaaaaatattgaaatcaccgccaatggctaaactgatatcggtaatgatctcctcacgaataccgtctaaaggcgggttagtcacctgtgcaaacaattgcttgaagtagttgtacaacaactgcggctggtctgataaaacagccaaaggcgtatcgttacccatagaactgatcgcttcggctccctgacctcccattgggttgatgatggtttttaaatcttcaatcgtgtagccaaacaacttttgtcgggtcaggaaatccagtttttcaaccggagttgggttgttggtatacggtattttagataaaggcaataagttagcatcgatccattctttgtaagggcgtttggtaacgatggatttttttacctcgtcgtcttcgataatacggccttcgttcatatctaccaggaacattttcccaggctctaagcgaccgtgctgaatcacatcttcaggatcgatatccaaaacaccaatttctgatgacatgatgacaaaaccgcttttggttaaggtataacgtgatggacgcaatccgttacgatctaataacgcaccaatgacgttaccgtctgtaaacggaatagaggcagggccatcccaaggctccataatacaagcgttaaactcgtagaaggcttttttctccggagacatggtctgatgtttttcccaggcttcagggaccaccatcatcatggcttccggtagggaacgtcctgtcattaatagaagttctactaccatatccatagaagcagaatctgattttccttctaagataattgggaatagttttttgatatcatcgccaaaaattttgctttgcatcaattcttcacgggcgcgcatacggctaacgtttccgcgaagcgtgttgatttcaccgttgtgacacatgtatctaaacggctgtgctaagtcccaggatgggaatgtattggtagagaaacgttggtgcactaatgccaaacgagtcactaaatcgggatcttttaagtcaacataataacggctgatgtcttccggcatcaagagacctttatatattatggtagttgtcgataaactagagaaataaaacatgtggctttcggaggttttagatcctctaatggcatgctcggcaatttttctagctgcaaaaagttttgcattaaattcattttcagttaaatcctgaccgtttttgctaacaaaaacctgtttaactgttggttctttttctgcggcgatttgccctaaattttctacttcaaccggtacatctctccaacccagaatctttaaattttgatccttaatagtcgattcgaaagcgttcatacaaaaagaaacctggtttttgctttttggtaaaaaaaacattcctactgcatactcacgtgtttcagggatttcaaaatcacatacttttttaaaaaaatcatgtgggatgtcgaataaaattccagctccgtctccagttcttccatcagaactaactgcaccacgatgttccaattttattaagatatccaatgctttgtgaataatatcatttgatttaataccattcaaattacaaataaatcctgcaccacaattgtcgtgttcaaattcaggcaaataaagcccttgttctttaactttcattcttgatattttttttacaaaaatagagatttcgttaaacataatgtattgaaattgcgatttggctttcatttttgttgtaatattagaaaaagacttcttaattgataataatgttattttgaccattgcgaattattaaaatgacaatacggactaaaatatagtatgaaaaatcgctgtaagactaataaatacggtggtctttttgttaaatatcaaacgttttagtgatttctagttaatattaacaaattatttatttaaccatttctttgctttcaaaaagaataaacgtttcgtgcatatcactctcgttttttaattgaaaaagattttactattaagttgatttttgctacttttgtcgcacttttattctgaaataaattcagaaccagacaaattctatattatgaacatacacgaatatcaaggaaaagaaattttagcaagttacggagtacgcattcaacgcggaattgtggctaacaatgcggttgaagctgtggctgctgcaaaacaattaactgccgaaacgggtacaggatggcatgtgataaaagcacaaattcacgcaggtggacgtggaaaaggtggtggagtgaagttggctaaaaacttgcaacaagttgaagaaattgctgaacaaatcattggaatgcaattgattactcctcaaacttctgctgagggtaaaaaagtaaacaaagttttagttgctgaagatgtttactatcctggtgaaagcgaaacttctgagttttatgtttctgttttattgaatagaggtacaggacgtaacatgattatgtattctactgaaggtggaatggatatcgaagaagttgctgagcatacaccacacttaatttttacagaagaaattgatccaactgttggattacaaggttttcaggcaagaagaattgcttttaacttaggtctttctggaaatgcttttaaagaaatggtgaaattcatcgattcattatacaacgcttacgttggttctgatgcatctatgttcgaaatcaacccggttttgaaaacttcagataacaaaattatggctgttgatgctaaagtaaatatcgatgataatgctttatacagacaagcaaaatatgctgagatgagagatatccgtgaggagaatccaatcgaggttgaagctaaagaagtaggattgaactatgtagatcttgacggtactgtaggttgtatggtaaacggagctggtcttgcaatggcaactatggatttaattaaatacgctggatttgagcctgctaacttcttagacgttggtggaactgctgatgcaaaacgtgttgaaacagctttccgtatcatcttaaaagatccaaacgtaaaagctattttgatcaatatcttcggaggaatcgttcgttgtgaccgtgttgctcaaggtgttgttgatgcttacaaaaacatgggtgacgctatcaatgtgccaattatcgttcgtttgcaaggaacaaatgctgaaattgcaaaagaattaattgacaactcaggtatgccaattttatcagctgttcaatttcaggaagctgctgaccaagttaaagctgctctttcttaattcaataagaaatcaattgatatagaaaatccattccgaaaggagtggatttttttgtttttataaccgcaaagcacgcaaagatttacgcaaagttcgcaaagttttttttgccacgaattcacgaattatttttgataatctttgagaacaaaaattcgtgaattcgtggctattttaaacaaattgctttgcgaactttgcgtttctattgacaatgctaagttaaattcttagcgccctttgcggttaaatgattcctgactattttaaaaccgctgccagttctacaatttcaaaatcgggattgtgttcaacaaattccctgatcatagcagtatgtccggctcctaataaaaccatgattttgtcgtctttactttcggttagtttttgaattaaagcatacatatataggtttcttctgtaccattccgaaactaagtaagcccccacaaaatcgtccgttttgcctcctttagtagccgtttcaacataccagccaatattgtcttcattcgattttttagtattgatatctaacagtagttcagtcagtgaatatttggcaattttttcattttgactcttttcataatatttcatcgtttcttcattctttttgattagatcaaactgaccggcggctgtcatcccttttacaagactgtcatatggaaagtcggtgttgttgtaatcaatggcatatagctttttatggcctagttttttagctgatcttaaagcgacttgtacaatttcatctgattgtttatgaagtaaactgtccgtatttctattgtagaatttgtccagtttgtcttgtttttggtagttccattcgacaaagattttatccggaccaaactttttaattttattggtgatgttctccagttccttttgacttctgtctgacatcacattaaagctgttgattttagcaacgtcaagtcccgggttttcaaaatggaaggttccaagtaagagtacttgttttttctttgactgtccggaaacggtattaaatgcgataacagcaagtaatagtaaggtgatttttttcatgatgattggtttttaaattcaggacaaatgtagcatagggtttcaggtgaaattttagtttttgataaacgtcaaatttcagattacaaaccttgagaatctgcggttgaaaaatttggtgtatcgtttttaatggttcgtcacccaaaagagaggttttgtataaatatagtatccatatgaagtcatagttgtatttttgaaaggacaacaacattattatgaagctaaaaataccattgtcttatcatatctttctttttttgggattgtatatcacctttaatctttgggaaattgggataaacaatcgggatctggatcttgtattcaacaggatttcctttatgtttaacattagttttatagtggtaatctttattgtctactttctgaattttcatactttctgtaaatggtttttaaacaaaaagaaaattctcttgtttgtgattagtattcctatcaccttgttgatttttgcagcaatacgttattttgttcaggaagtgatactgtatgagcttaccggaattcataattatgcaaaagaaaccagagagatcagctattatattaaggataattttttctttggcctgcctgctgttattttgagcagtctggcttatctgttctttcattttcaggaaacgcaaaaacaaaatcaggaattagtattagaaaataaaaaggcagaactccaaatgttgaaatcgcaggtgagtccgcattttttgtttaacaccttaaattccttttacagtcaattggttttgaaagaggatgaaatggcttcggatattttggtactttcggatttgctgcgttatgtcattacagaaacggagaaagatgaggtattgctttccaaagaaattcagtttgtagaaaactacattcatttgcagaaaaaaagatttgaagatcagctttacctggattttgtaattgatggtgattatgcatcagaaaagattcttccgtcggtgctggtgcattttattgagaacgttttcaaacatggaaaattgaataaagaagaggagaaagcggttattgctatcgtaataaaagaaaattttttagagctttcaacgtttaactataatggtgcaggggagaattattcttcaaccggaattggttttgataatcttagcaaacgtttagagcatgcttataaaggcgagtttacactcgagaaaatagcagaaaagaatacctttaaaacctatttaaaaataccattaaaaaagtaatatgaaattgaagtgtatcattgttgatgatgagccgccggcaacgcgtattctggaaaattatatcgggaaagtatcttttttggaaaaaacagctgttttcaatgatgcgttgaaagcattggaatttctaaatacgcatagtgttgatgttatttttctggatattcagatgccgcagctaacgggtttgcagctttcgagaatcatttctagagagataaaagtaatttttacaacggcttatcctgattttgctttggagggattcgaattgaatgctgtagattatttactaaaaccaatcgcttttgaaaggttttatcaggcggtttccaaactaaatggggattcaaaaacagaagttgtatcgaataaccattcggctgaatttatttttattaaaactgacggaaaaaataaatttataaagttgtttttagaggagattttatatgtagaaagtcttcagaattatgtttgtattcatacgtcgaatcagcaaattatcacacattcatccctaaaaaatgttgttgaatcactgcccgaaaatggttttgttcaaattcataaatcgtatgtggtagctttaaaacatattgagtcaacagataatttttcggtttttacaaatgggaaagaactcccgattggggcaacttttaaagatgctttttttgagaaaatagaggagaataaaatttaaccgcaaagggcgcaaagttttttttagattgcgtttcgtaaccgcaaggagcgtaaagtttttttcttagattgcgtttagtaaccgctaagttcgcaaagttttttcttagattgcgtttcgtaaccgcaaggaccgcaaagtttttttcttagattgtgtttagtaaccgcaaagggcgcaaagcttttttagattgcgcttagtaaccgctaagttcgcaaattttttttcttagaaagtgcttagtaaccgcaaagggcgcaaagttttttcttagattgcgtttcgtaaccgcaaggagcgcaaagtttttttcttagattgtgcttaataaacgcaaagttcgcaaagctttatccattatagctttgcgaactttgcgtttgtatagattcttatagttaaaaaaccttgcgctctttgcggttaaacaaacagtactattttttattcttaccgtttttatatacaactttttctaccactactggttttccgttgccttttgggaactctttcttcttaggtcttttatcagctgaacttgattttgaagggctttgatcgcctcttgctctttcagaatctttaggagcagctttaaattcaggtctgtcctttgtgctgtctttctttggaatctgagctttatgcttggctaaaacatcatttgggtttttaggattttctttcgttcctcttaaatgaattaccagtccgtttaagaaattacgcaaaacctgatcaccacactccatgtaattctcatgatcttcggctctaaaaaaagcgcccaactctgattttgaaattctaaaatctactaattctaaaatttctactatttggtcgtcacggagcatcaaagccacgcgaagtttttttaggatatcgttgtttgtcattttttgttttttagtttcaagtttgtttttagtttcaagttcccacaatcttcgtcggaatcacaaactatacacttaattttttacaaaggtacattttaaaagtaattattatgatacagggtgttttaattttttttacaacgaattgtaagaattaaaattagagcgcaatataactagtgaaaattagtgtatttgtggcaggttctttggcttttatttaaaattacaatcgtttgagatatttattaattgatctaaatcggactttaatggattggctgtaattacaattcgatttagagttactgtctttttttgtatttgaaactggcaataataattttgttggattctggtatttcgattaggttttcatcttctaaataaagcaaaatgcatttataagaaatatctttaaattttaatatgaaaacgaattttagtaaaataaagtgttaaattacaggtctaacaaaccaaattattaaccattattaactaaaatttatgaaacaaaagaatttcaccttttccttcgttttgttcttacttgcttcaggcattctgtttgcacaaaaaataacggtaaaaggaaacgtaacagatgagatgggagtttcaatgccaggtgtaaatatcctggagaaaggaacctccaatactgctacttctggtttagacggggattttgccattagcgtaaataaaggatcagttttattattttcgttcgttgggtacaaaatgaatgaagctactgtaaccaaaagtattttgaatgtaaaaatgaatccggattctaaagagttggatgccgtgacggtaaccgcttttggtatcaaaaataaaacaaaatctttgggttatgccagtcagacgttgaaggcctcggatattgaaagaccaggtcaattaaatgctcttgagagtttgcagggaggcgtagcgggagtaaccataagtaaaacttccgggggagttggtgctggtgtagatattgttattcgcggtgtttcgtctttagatccgtctaacaataatcagcctttgattattattgatggtaaccccgtaaataactcgacagctataggaaatgtagctccctcaaaaggttctaattctgtaagtagcggagaacagttttcattttctaacagagcgatagatatcaatccggaagatatagaaagctacactgttcttaaaggagcaggtgctacagcattgtatggtattttggccggtaatggtgtgattattatcactaccaaaagaggaaaagaaggaaaaccaaaaattaatatcaattccagcatttcttttagtgaggtaaatcattatcccgagctgcaatccaaatacagagaaggtctaaacggagcttcttatgtaaaaagtaccgtatcggatagccctagtggttttgaatgggtaaatcctgcaagcccgggagggttctggagttttggaccggaatattccagttcagatggtgcaggaattaaatacagaaatttttataaagatttctttaaaacgggtgtgactcaaaacctaggcgtgagtgtaagcggaggaacagagaaaatcaattatttcgtatctgcttctaccagtaaagatgaaggcattgtaccaaacacttcttaccaaagaaaaactttcaaagcaaatggagggtatcagatttctgaaaaatttaaaataggttcttcttttgcttatacaaaatccggaggtataagatctaataatggagacaaatcggtgatgagttccttggcctattggtcaccctctattgatgtaaatgattatcttaccgcagctggcaaagaaaaagattatacaaatggtattatcgatcagccaagatattttactgctgtaagtaatttaaaagatgatgtaaatcgtattattgcttcggccgattttaattatcaggcaacttcatggttaaactttgtgtatagagctagtgtcgataattattcagaaactagaaaccgatatgttcctgctaatctcgatgtgggaacagcagtaaatggttttattctggatgaaaatattggctttacgggactcaattctagttttgtgatcacggccaataaaaaatttggaaattttaataccacccttaccttaggaaatcaaattttggataccaaaaacacctattcaaatgtgagaggggaaggaatttttattaccgattttaataatatttctaatgcgaccaatttatttgcttataattcaggtgaagaacgcgtaagaaacgtggggaacttttttgaagcaaaagccgattataaagaaattatttatctgggggttactgggcgatacgatcaggtatctactttgccggtaaagaataataaatttgattattattctactaatttgtcttttctttttggagacctgatcgacgcaaacaaatctattttgtcttatgggaaattaaggacctcctgggcacaaagcggaaaaacacccccgtttgcgatttttagaaaaaatataaaagatttaaattttccattcaacggagttggaggagtttctgccacatctgttgacgccaatccaaatttgaaagccgaaatcatatctacttgggaaataggtacagatttacgtttttttagggataggatccgattggaatacacgtattttaacagggttagtgacgatcagattattcaaagaattgtgccacaatcctcttcaattacggcattctgggacaacggcggatctttaagaacaaccggaaacgaattgactttaggtgcagactggtttaaaaatccaaagttcagctggacctctacgctaaattttacacaatacaaaactaaagttacagcattgccttttgaaaatattattttcggatacgactctcaggctaccaatataacttcacaagtacgtttgggcgatgcagcgggaacactttatggccagtcctggcaacgagtagacggtaaagtagtgattggtgcaaacggattgcctgtttttaataaaacaagtacgggagccatagcaataggtaagatcggtgaggcttttccggactgggtagctactctcaacaatacctttaaaattaaaaattttgatatcggttttttgctggaatataaaaaaggcggagatgcgtatgatacagccagaagaaacggaattagaaatggtgttctaggagttacggctgacagaaacgaaactgcggttttagacggtgtaaaatcggatggagcaggaggatatgtacctaacgacatccctataaataaatcgttacgaaacaatttttataacaatacgatttacaatacagctgcagatgctcttatacaggatgcctcctggtttaagctcagaaatgtatcggttacttataatatgaccaaagaagcattaaaaactattggtgtttctaatttgtcttttacggtatcgggcagtaatttcctgatttggacaccatttgatggttttgatccggaaggttccagctacagcgccggtaccaatgtttacggatttacaggtttgaccactccgcttacgcaatcatattcatttagtattaatctaggattttaatttataaaagatgaaaaatatactcaaaacattcttgaccataagcattgtcctaacaacttatagctgtagcgatgattattttgatgtaaatacaccaggaaatgtaatacctgacgcgaataagaatctaaaagatttattggggcctgcaatttattacacatttgatgctcagtatgctgctgcgaccagagtttctttgctaacgcaatatacttcctctgcacttaattcgtcagtaggagtagacaatcattacgaagaatccttagatagttattggtcttctgcctatgtaaaagctttagggaacctgaaagaagtagccgataaagccgatgaaacaaaatcatcacattacaagggtattgttcagattttgcaagcggtaaattttggattgctaacggatctgtacggagatatacctttttcgcaggcgtcactggcattacagaattttaagccggaatatgatcgtcaggaagaggtctacaaaggtataaacaacctattagatcaggcaattgccaatttgtcggctcctaacacatcctcttttactcctggaaaagaagaccttgtttatggcggaaatgtagaaaaatggataaaagtcgcctatacctttaaagcgagatatgcattgcacttatcaaaaatcaatgcaacaactgctgccaatacggtagtttcttatttggcaaaaggaataacctccaatgcagatgattttcaattgatttacaataaagttcagaccaatccgtggtataataatcaattaggacttaataccggaaatgcatcttatctgataaccaaacaatttattggttttatgaacggaagcacgtttgcttttaaaacggtaacaatggatcccagaatgccattactgattgatcttagaagttatcctgtaacagatggggttgtgaatcctaaagatccaaatcctaatgttccggggaattatattggtggagaacctgggcagggatcaaaaggaacaccggcacctaatgctaaaatagggttgtattcttattattcaaaaatagattcgccccttgttattttgtccttttctgaagttaaactaatgcaggctgaagcacaatttattttaaatggaggtaatgcgacaagtaccggaacaaatgcaatagggtataacgcctatagggatgctattggtgcaaatatggataaattgggggtttccgctccggataaaaatgcttatttgggagatgcttctataaacaaaggtgccgccagtttgcagttgaaagatattatgagacaaaaaaatatagtactctatttgaactgcgaagcatttaatgattacagaaggtatgatttttctacaaacgtttttccgggattagccctgcccaaagccgctgatcctgctaatggaggaaaatggataagaagatttatttattcaaccaacgaaagaaacgcgaataaagcaaattatgaattaaattttaaatcaatggtcacaccggtttggtgggataaataaaaactaaagcggctctgattttttaatcagagccgctttttcataagctgttgctttgattcaaaatgtcaattacttggtctaaatcatttttagcgtgattgttttatcaaattggattacaatttattgagctgggcgaagttttttcgccacgaatttcacgaattttcgccaattggatcgcgtttaaatttaattagtggaattcgtggcaaacttttttgtttttacttaaagttataatcgtttaagatttctattaatttatccagatcttcgggaagatgattggcagtaatcacaattcgatttaaaggagctgtgtctttttggtatttgaaattggcaataataattttgtttgcttccagtatttcgattagattttcatcttctaaataaagtaacgggtatgttttatcaaattgaatcgtgtcatttttgattagtttctgatcgatgtgatgaaggttatccagcagtttctgatgttgtatactgtaaatttcggttgcatccgccaatgtctgaacaaaagcgggattcattcccgcagctgatataaaagtatctgtatttttgatctggtcgatgaaagaaatatcactggcaataacgccgccagttaagccgaatgcttttcctagagacgaaaccataattttgcgcttaatcggaaggtcgatgtgtgaatagattccacctccattttttcctaaaattccaagcgaatgcgattcatcgataagtaaagtgacttctttatgactggggatttcctttaaaacagataaatcaacagctttggtttgataggaaggaactccgtcagtaagaatagtgattttctctgctttagaatctgttagacgtgggtgtatttgatggttcaaaaatattggtaaactgttgggggttttaattgcggtatgcagatctgaaaaatgaaagtaacaatcggtggttttagtcaattgttccgtaactaattttccggccagcattcctgatgacaccgtaacggcactttcggcctgtatgtgatgggcgagaaaagtctcaccattttcataagccgttaattttatattggcattgcgggagcttccgtaagtagttccccattttcgtatattttgaatggccaattcctgaaaagccttattggtgggtaatcccaaataagcagttcctccaaaatacaagtattgctcctgattgatttcaatagttctgtccggaaattggtctacgttcataaaaattagattaaggttactccggtgccgttaagttcagaataatgaattacgccattttttatggttactccggtcgcaatatcctgagccagaagtaaggctccgtccatatccacataatccagctgtggcaataaatgtgcaatagccgagattcccacagtcgattcagtcatgcagcccaccatcgttttgagccctaattttttggcttcttcaatcatgcgtttcccgggagtcagacctccgcattttacaagctttacatttacgccatgaaaatgattgaaacatttggcgacatcttcttcaataatgcagctttcgtcggctattacaggtaagaccgaatgtttgaaaacttccttatgggcttcccagtcatcggctttcatgggctgttcgaggaattctacccctagttttttgagctcaatggcgttgtttatggtttcctcaacatcccagccgcaattggcatcgattctgaaaatggcatcagtgtgttttcgaagttctttaacaatagcaatatcttctttggtacctaatttaattttataaataggccagggtagttcctgcattttcgaaaccattttttcgatagaggcaataccaatggtgtaatctgtaagcggagttttttctgtagagtaattccataattcatatagtttcttgccttttttgcgtgcgtacaagtcgttataagccatgtctaacgcgcataaagcaaacatgtcctcttttaagtacggatagattttagaccagaaaatttcgggagtttcagtggttgtactctcaataattcttctgattttttctaaatcctgaatcatcaccggaacagttgttttgtaatacggatttgaagtggcttctccaaaacctgaaaagccatcacttttaagttctactattagtgaaggctgaaaatcaattgattctctggaaatggtaaaagtatgtttgagttttaaattgtattctcttaaaattaattccataagtttgttttttatttaatagcccagccagattattgcttttgcgaaaccatcacgccaaagtttttcattatgttcgccgccttgtacgattttggatttggtgagatgaagacagtaacagcgtttagtatccaacagacgttccatttttgtcatatctcttaccatattgtcactttctttgtctccgtataaaaagtaaattttagttttgactttaggagtttgttccgtcaaagtataaatgttatttgaaaaccagaaggatggcgagaatatacctgcttttccgaagatttcgggatattttaacacggcatagtacgaaaccaatccgccaagtgaacttcccataataagggtgttttttgccttggttttggttctggttctgtaattttggtcgatataaggttttagcgtttttacaataaaatcaagataattatcggcatcaccaccgccgtatttttcatttttatacggagttaattcgtttaaacgttcgtcatttccatgttcaatgcctactacgattacaggggctttcagactgtccagtttttcatctatattccattcgcctgcatgcgaggttgtgccatcaaacaaattttgggcatcgtgcatataaatcacgctgtatctctttttggccgaagcggcatatccgtcaggaagataaatccatacttttttagttgtttttagctgagtagcttcgattgtaaaggtagatacgtttttggaagcagtacttttttgtgcgcttgcgacagcggttacccataagaaaataaaaaagaaaaatcccctaatcatgagtactgttgcgttttagagttaaaaacaatattttagctaaaaataataaattgatgaataccgaagccgaaaagataagtttacttttagaaatgattgctttctctaccgttgacggacagttgcataaaagagagtatgagtttttgtggttggtggctcaggaactaaatattggtcccgatgtttttcgtgatttatttcatcaggaaagtgccggttcagttataaaatcggagtttcagcgcattcagcaattttatcgattggcgctgattatgtattgcgatggtatcttgcatgaaaaagaagccaaagccatacagcaaattgcgatcgaaatgggtttgaatcccattgcaacccgacgtgttctcgatttaatgaaaaaagcaccaaatgctataattgaccctaaactgttattgaaagtatttcaggaacagcataattaacttttaagcttcagatcagggaattacttttttttaatggacatttttaaaccaataccagtttgaaaatcaggtgcattgtccagatttagatcttctctgaaatacacaaaataagaaaaacgtttggtggaataggtgcagataaaattccatccctctaagtcttcgtataaatgtgaaatcgttttttgccaatgcgtctttattctttgtccggtcagaaccgtatgatctttttcgttttttctattataggaggactgaaaattataattgataccatacgaaaggtggttgttgtttttaagttttaacttataatcaataagaccttcaagactatagaagaaattcctactactaatatttacccgatctccatattctaaaaaatgctggcgtaaaactcctgcactggcaccaaaagtcagaatgtttttgtttttaatgatcttcttttttagaatagaagaagaaattccaaaatcggccacaggattgtattgagaagtattgataccgagttgtgctccaaaattcaaatagatatgatgtttttcattcatttctaattttggataatagttgtaattgatgtcaattccgggaatggtaaaattaccgttatgcatggtgagaaccctgtcattttcgtctttataagatattccggctttatttaaaccatagtaatgtcttgagaaaggatcttctccgccggcaatgttactgtgaaaccattcgattgtttcatcagaagtaaaaatagagtacggatattttcctccatccagcgaatttattcgtaaaccgaaattaagttcgtgatgaaacgtgataggcaatgtaaaagtaaatcgatacgatcgaatcacaccatcggcggtgaactctttagtattgtgcggaactttatttaggtcaaaagcatactcccgaacatgccagggcatgttttctgccgccttttgatcgttgggatctgttaattcatatgactttacataaggaagagcgacattaccgctagagaattcaaatgaaaaagagtatttatcaggggagcgaacattgaaattatgatttaatctggaaatataaattcctaacgggtgattggaaagaatattgggtttgatgatatccgaagaattttctatttctttattccaaaaatcgttatttcctgattgtgccagggcagaaacatggaaaataaaaagagcaagaaggaataaaagatatttcatttcagcgttttaaaattttgttaaaactaatgaatttgaaattcgttataaaatatttctcccataattttaaggataaaattcttttatgttctggatgtcaattgttttagaatcgtgtacttaaggtagctgttcctgcagttttttaatgtcgtcacgcagttttgcagcctgtaaaaagtccagttcctttgccgctttctccattgattttcgtttttcacgaatcattttttccagctctggtttcgataaatatgccgtctccggttctgccgcagctgacggtaaagtatgtcctaattcatattctaccagaggatttttagtaaaggcactatcgatttttttatttaaggcctgaggagtgatattgttttgagtgttgtaattgatttgtttggttctgcgataactggtctcatcgattgttttttgcatactggcggtgatcttatcagcatacataatagctttcccgttaaggttccttgcggcacgaccaatagtttgggtcaatgatctgtggtttcttaaaaaaccttctttatcggcatctaaaatggcaacaagtgaaacttcaggtaaatccaaaccttcgcgaagtaggtttaccccgatcaaaacatcaaaaatccctttacgtaagtcctgcataatttcgatacgctccagtgtatccacgtcggaatgaatataacgacagcgaatgttgactttggtcagatatttggctagctcctcggccattcttttggtcagagtagtgaccagaactctttcgtctaattcgcagcgaacctgaatttcttcgatcaaatcatcaatctgattcaaacttgggcgtatctcaataatggggtctaataatcctgtcggacgaataatctgctccacataaaccccgtctgttttctgaagttcataatcagcaggtgttgcagacacgtaaataacctgattttgcatggcttcaaactcctcaaatttcagaggtcggttgtccattgcagcaggcagacggaaaccatattctaccagattttcttttctactgcgatcgcctccgtacatggcgtgaacctgcgaaaccgtcacgtgactttcgtctaccaccatcaaataatcttttggaaaataatccaacaaacagaaaggacgggttccggcatctctgccgtcaagatatctcgaataattctcaattccggaacaatatcctaattcgcgaatcatttctaaatcaaaatttgtacgttcttccagacgttttgcttccagatgtttaccaatttctttaaaataatcgacttgtttgactaaatcctgctggatttcccaaatagcaccttgtaaaacatcaggcgaagtcacaaacatattggcaggataaatagttagtctcgtgaatttttcaatgacttgtgaggtcttggcatcaaaggattctatttcttctatttcatcaccaaaaaagtgaattctataggcgtcatcggcataacttgggtatacttcaacggtgtctcctttgattctgaagtttcccggagtaaaatccgcttccgttcgggaatataaactctgcaccagactgtgtaataatttagttcgggaaatgacctgatctcttgctatttcgatgacatttttctgaaattcaacaggatttccaataccatacaagcaggaaaccgaagcgacaaccaatacatcacgacgcccagaaagcagggaagaagtggtactcagacgcattttttccagttcctcattaatggatagatccttttcgataaatactccggtaaccggcataaaagcttccggttggtaatagtcgtagtaagaaacgaagtattccacggcattattcgggaagaattgcttaaactcagaatacaactgtgcagccagtgttttgttgtgtgccaaaaccaaagtaggccgctgaacttcctgaataacattggccaccgtaaaagtttttccggaaccggtaactcctaataaagtttggtatttttcaccgtctataatgccttgtgaaagtttttcaattgcttgcggctgatcaccttttggactgtattcagaggatacctggaaattcatttttggatgatgaaagattagtgtcgtaaagatacgagtttgatttctttttttcggaaagtgtaattcaaaaaaaaccgtcaacaaatttcatgttgacggtctttttatagttgggaatgatttagaagctaagacttaatcttgcaaaaacaaaacgtccgttttgaccaaattgagatatatttctggaatatacaaattgattttggttggataaatcaatagcagttggagtagcggcgtaggttatatttccatttgcatcaacgccattggctcttcttgctgtttgtggtcccaggtttttgtctggataaatgtcaaaaacattgttagcaccgattatgattttggctacagggctaattttaaaacctacagacatatcggtaatcactcttcctccccaaacaggatgttcgttttctactgcttttccatttacaatagtggcacctacaaaaccatcaccgtttacgtccgcaacgtttggatctgttacgtctccaaagtacacgtttcttaagaagagatcgatttttttgtaagtaagaccgtttgtcaaatttacttttacgcggggtactgcttcttctaaataaattctggaagattctgaaaagtaagtatttacttgccctgccgcttctagtataggagaagcatgaatgtttcctattttacgtgttttagaaaaggtaccggacaagtcattttttaaagtcagattttcattcaggttcattttgttggtaagtaccacatcaattcctttagattcggtgtcaatggcattggcgaagaaagttgctgcatttgcccctgcctgatcatataaagactgagtcagtggagttggcgtaaactgatcggtaagtacgactctgtcgtctattttgatgtaataagcatccgcagttatggtaaggttggcggatggaattttagctgtaaatccggcgcttacactggttgactcttcttgttttaatttcggaattccaagtaattttgctatttcagaatcattactgaaagttcctacttcaaaaggaactcctccggtaaactgtgttgcagtggattcataataaatttgatgtaaggatggagctctgaatcctgttgagaaagcaccacgcaaattgatgttgtctgtaagtttatagcgggttgcaattttaaaattggtagtgcttccaaaatcagaataattttcaaagcgaactgctccgtttagcagccatttttcggttacatctaattctaaatcggtataaagagcgacgctgtttcttttctctgtttttgcattttctgctctgtacccgggaaaaacctgtgctccacctggtctggcggcgccataaaaatcagtcactcttatgttggcaggtgttgtaccggtaacgacatttccattgatgtcgtattgactgtaggaatcaggaactccggcattgatgccgtactgttcgtagcgatattcggcaccaaatgcgacgttcagtgtattgatttttttgctcatatcaaaattcgttgtgttttgagcaaaacgtaaacctcctgcatcaaattcagtaggagagccttctcttaaagtagcatttacagtgttttcgatattataatcaaaagaatttcggccatatgtattgctcagatcaaaatgccagtctttaaaaatagtacctctaagtcctgttgcagcagaaaggtcattaatggtagagtgaatttcgggtaagaaaccatttaggtataaaccggtgtaagatcttgattgatttggtcttctgaaaaagccggcagattcaccatttctataactggttccaccaaaaacataaacttctaatttatcatttatgggataagcggcattcaaaaagaactgaacacttttaaattcagattgccctattctcatattaaagtttcttctttcgagctttcggtaagccaattctccgtctgtggcatcaaaatttaaggccgtttgtaattgcgaaatagttgtggcattactgatatttgtttgttgtgccccggtaaaataacttactttgggagcatagtttttgattaagcttacaatttgagcagaattaggagtattggtaatgtttccgtacagagaatttatatttattccgtcttctgaagctctttgttcaatcgcattataagcgttatagatcgtacctgcggcatcattagccctgcttgtagcatctcttaactgcaagcttcccgttaaattaataaaacttttttctttgcctaaattagttccgtaattaacatccatttggtaattgttaccatcatttcctcccctgtgatcgttagcattttttgaaaagttacttcctgaaaagagattaatatctatttttttggtgtctttttttatgttaagattaattacccctgctatagcgtctgaaccatattgagcagaagcaccatctcgcaagacctctattttttcgagagcaaaagcgggaattgcattcaaatcggttcctactgatcctcttcccggagttccgtttatgttaactaaagaggaggtatgccttctttttccatttactaaaaccaatacctgatcagggcctaaacctcttaattgcgccggatcaaggtgatccgttccgtcggctaccgtttgagtattagaagtaaaggaaggagctaccatgttcaaaatctgattcaggttggtttgtgcgccttgtgttgcaatatccttcattgcaataacatctataggtacagcggattctgtaacagttcgggttgggttacgcgaaccaatgatcactacattctccagactttcaccactgcctcccgatagcgtaacatttacagttgatccgtcaaccgttacggttttggtttgtaaccctacgtatgaaaattgcagaacgtcaccaactttggcttcaatagtatagttcccgtcaatatcggtaacggctccttttttggtactgatgaccaaaacgcttactcccggtaaaggcgctcccgtttcatcgacaacttttcctttgacaagatcgattgctttgttttgattaatctcaacggtattttttacacgttcagcagcattaaggtcattattgtttgctaaaatggcagcggctacaaatggaataaatgacactttttggagccgtgaaaacatttggtttttaaataaattcttcttcataattctggtttatattagtttggtttaaattaatagaaaagcaaaaaaaataaatagtaaactggagtactataaattatttttgaaactgaattcgtttggaatatttattcaataggtttctgcaccatattgtaattgtcactttttttaaatctatgaccggattgaactacagtagattgaggtggtaattttcgctgtatttttttagcggttttctaaaatagtttaactgtaattgtaaatatatataattttaagttaaaactattggctagtttactttaagtgttaatttttttaaattttaacagatgtttcgcttttatgttctaagaaatattttttcaaaggtttgagtttgtttttttaggatttaaaaaatcaataattccctcatttacaattttagactgatcgatgcttaaaaaatgacctgcatcattaatcgtttttgttgtaccgtttattaaaagtttttgagctctttcgagagtttcttgtgaattgataacatcatgatctccaattaaaatgagaacaggattggtgatggattttagttcatcatctgagaaaggacgcattttgagcatgcttgaatttgactttgcatatttgttggccaaatagaattgtcttttgtaaaccggactgattttttcgggatgaatagaaaaaattttcaatgttttttcgaatctcttttcatttgggaaaagtttcaatagtaaggctggagtcatctttcttactttatctactgatttgaaggtttgtgccggacttaacagtactattttatcaatagaattttctttttgagtggctagtaatgtcgcaatccagccaccgcgggaggcacctatgatatcaattttttttaatttgtaatgattgaaaatttcgttgtataggataacaatttcttccgaagacagtggttttgtggtcaaagtagattttccgggttccattagaaaatcaatggcataaatgcggtgtgttttggagagtgcttttatgttggggtaccacatagtcgaactcgcatccataccatgtagcagcactaaatctttaccgttttctgcaccgctaataattagatgaacggttccgtaagtcgtaggtatattttcctcgttatatggaatatcccaaagctttagtgcctggtcgtatgaatttatataaccttgtttttcgctatttgttttaaaaacataatcgtcaaattttgtctttttagaagccgcacaacctgccagtaaaagcaacaacactactttaaagaaaatttttgccataggaataaaattcaaattactttaaatgtacaaaaatggcaactctaaaaagtaacagaattttattttaaactattagaatttcaatatcaggcattttcaaagttccaggccttttgttgattttcacttaaaaaagtccaggctacaattcggcttgttttttggccctgagccatatcaattgtttgaatatcgaccgcatttactttgtttaatgttttgtaaaggctgtaaagattatctctttttgatactaaagtggtgaaccagagacattgtgtggcatatttagcgctttcgtaaatcatttgagtgataaaacgaagctcacctccatcacaccataattcagcattttgacctccgaagtttaaaacaggggctactttctttttgtccttcgggtttaaattagaaactttacgaagcgtacttctgttggcttcttctgccgaagcatgaaaaggcggattgcacatcgtgaacgtaaaacgatcttcgggagtaatgatgtttttaaaaataaagcgcgattctgtctgttgctgcaggctaatggcctcaattagttttggatttgcttcaataattttactgcagttttcgattgcttttctgtcgatatcagttccaacaaagtcccagccgtaaatagcatttcctaaaataggataaatgcagttagcacccgtacctacatctaaacctaacacggatgatccctgaggaatagttccgttattagtttcggccaataaatcggccagataatggatgtaatccgttcttccgggaataggcggacaaagataatttttagggatgtcccaattttgtatgtcataataggttttcagtaaagctttgttgagcagttttaccgaaaggggattactgaaatcaatagtttcaattccgtgattatttacagcaacctgcgcttttaattcagggcaatttgcaataagaagttcgaaatcataacgggagcgatgcagatttcggggatgtaaattatttttttcggaattgtctgttgctttcattttgtgaatttgggtgcaaagatagtcattccttttttgtgattgcattcagaacaacaatccttaatccatacattccatcaacagtaaatcgccatcggtatggataatggttaccagaccatcctgaagaacagaattgctgcttccggttctgtagccaatggttaaggtatcgttttcaagaggatattgtaaattggttgaataaattccgttaaccaccccaatcggaatcagggagataggagtttttgcagtgtaccatttctcgaatttacggggcagtaagaatactttagagtgatcgtcgagaataacaattttaagcaaatcgcggtagcgggcaatattggtgatattggttatggtatggtctgcccgttttccggtggcccagacaacatttacagcagggatcttccgatcgattaaataatcaaaagctttctccagatcggttttgtcctgatcgggagtatgaacaatttctatagggtattgtgtcgttttgtaaatttcaggatcaaaaccacggtcgaaatcacccagaagtacatcgactttgatgcccaattcaattactctctctatggcggaatcgagtacgataaccagaggagaccattccagcaattgtcctaataattccggatggcatgctgctccgttggcgataattaaagcgggttcctggtcgtcgcgtacgatatgatgtgaagacatttagtttttaatttgaaatgtgctgcaaatgtacaaaagttcgtgtttagtctcggtttatagtcacagtattcagtattcagtattcagtattcagtattcagtattcagtcacagtttatagtctcagtttacagtctcagtttacagtattccgaaaactgggactgcggccacggctgagaactgaatactgcgactgcgactgaacacagcgactgaacactgcgactgaacacagcaactgaacactgcgactgtaaacttaaaaaactaatctgcggtggtaattgatttgccctaaatgataggctaaatgggtagaaagatgcactaaaaagaatccggttgtcatttctttttcgaaaacaatttgcggataaataagctctaaatcggcttcggttaaactgtcaagagtgttgtttaccattaaaatagtacgctcgattttactgatgagctcagatcttggaatatctttcagggaaaattccaatggacgatcacgaacatagtctgtttttcctaattcggcaccaatgtaggtatttatgtttcccataagatgcaaacaaagatttcccgctgaattggaaatatccggtgcaattgcccaaatcagagcctcgttttgataggattcgatttcaacttttaatttgttcaggtctctgttaaaaagaatttttaaggtatcgatcaacatggtttttaagcttttggggttatcggaatccagatttcttcttcagaatccggatcttcttttttgtatttttcacccattatagcaaagtgcggtctttcatcaaccatatacgctgaattggggagccaatctacaaaaatttcacgatacgttttgtgaccttcgctttgagggcctttatgaacaaaaacagcatacaatccctcaggaattaccaaagatttcatttcctgtggtactccatcaagtgcagagacttcgactgctgcccatttttcgaaggtatttccgggatcaaaattgtcaaaatgtgcccttggaaaaacttccagagaatacaagttggcatcgattatgtttttaatttcttttcgtttcggcataaacgaactccataactcatgggttttgttttccaaaaacgacattattacgtatttaccaattagttttttttcggataagatctgaattctggcttccattgtttactgattattgaattttgtattttttgtaatcggtttcactaagcgaaaaataacctaacggataattggccttatcggccgtattgataatatttcctcttacggttgcgggaggagactgaaaaggtccgccaacattgtttccggcaatactcaccagaatgctcatataattgtaatattgtttagagataccgtaatgtgtcatttcgacttcatttccaacttttaaatcgtcatcatctgaagcgctgaaatattcatttccctgaaaaaatttgtcttcagtaacgtagtaagttgaggtaattttcgtcgaatatacatatttaaaaagataataattatcggcattagcaggatcgttaaaataagcacgggtttcaacttcttttcctgaaaaaccgccctgattgttttgctccacccgggttatgggagcgactgatttcatggattcagtagcagtataagtaattccgccggaaatcaccgttaaggtatagatttcgtcaattactggaatgaaattcgagcatacataccgtccggttttcggaacttcactaaaattgaattttatgttctggctgttcgtgataaatacggtggcacccgaaacggtagggatgacattttgaaaataacctgtagtggtggtcagttttatggtttgttgctttcctgtagttcctttttgccagtttatagccgcttctataactaattttggaggggcagtatccagattaacatccacaacttcttcacagccagtgaaaaaaatggatataaaaaggacaattaagagagttgcttttttcatgatctgtcttttattttctttggagggaaggttggtcttaaaatttaaaattatagctaacggcaggaacaattccgaaaattgaagtttttacggcttcattggcagcggtatcggtattttggcggaaattaatcgaggctgcattctggcggttgtataaattgtaaatactaaaaacccattctgctttccacttcctgtctttgttttttcgaggtgtcaaagttgccgaaacatctaaatggtgataggccggcaaacggttgtcgtttcttaaaccatagctaggcaccgtgattcctaaatactgatattgtccatttggataggtaacaggttgtcctgactgaagcgcaaaattagctccaaaagaccatttttcgttcaggttataggctgatgtcacggctaaattatgcgttttatcataggcagaactgtaccattgtccgttgttgataccagtctcttcgggagttcttcccggagtctgctgttgtgatttggataaagtataggaaatccatccgttgaatttaccttcgtttttctttagcataaattcgagaccataagctctcattcttccgttgagaattatttgctcgatcgcattattcgcaatcaaatcggcaccatcgatataatcgagtcggttttgaatctttttataataggtttcgacttcaacggtataagcgccattgttaatatttctaaaatagcccaaagcaacctgatctgcaatctgaggtttgatgtagttgtcactaggcatccacacgtcaagcggagtaggtgatgaggtattcgaaatcaattgaagatactgcgccatgcggttataacttgctttaatagcctgatcgtcgtttaactgataagaaaccgaaagccgtggttcgaaattgttgtaatcctgaatgaccttgtttttaccgaagtattttgttgaggtaggaattcctttttcgtaaatctgcatattattattgaaggttacagcctcattattgttgtaataattaatcgtagaagtacctaagcggtagaaaagactgtaacgcaagccataagccagtgtgagttttttggaaagctgattttcggcttcgatataaacagaaggttcaaaagcatattttttgtccagctggtccggattaattccggatttttcattacttggtttaatggtcccgggattaaactcatagtaaattccatttaaaccgtagttcagtttgaatttatccgagatatagtttttgaaatcgtatttgatgttgtaatttttaattccggagtcccatttaaagcctacaaaatctaagtcaagaccgtaatagtaatcgctgtaaatcagagataaattggaaaatagcttatcagagtacaaatggttccaacgcaggtttagtgtcgaatttccgtaaatattggtaaagctcttgttcagactaaatacgtcgcggccaaaataacccgataaatacaagctgttgttttcgtttagcttataactcaatttagtgttcaaatcataaaaataggcagcgttgtttttttgatcttcggataactttagaaataaatgagcgtaagaagctcttcctccaatcaggaaagaacctttgtctttcactagcggaccttcggctaaaattcggcttgaaattaatccaattccaccattgacatgaaattctttactgtttccgtctttttgataaatgtctaaaactgaagaggctcttccgccatagcgcgcgggaattcctcccttatataattttaaatctttgatggcatccggattaaaaacggagaaaaaaccaaatacgtgagaagaattaaagatagtagcttcgtccagtaaaatcaaattctgatcggcacccccgccacggacattgaatcccgaagcgccttctcccgcattcgtaactcccgggagcaataaaatcgattttaagacatcgacttcacccaaaacaaccggcattcttttgatggtggcaatggagagtttattggcactcatctcaggtgatttgatgttgattttacctttattatccgtaattatgacctctttaagttcttcaccgctttcggtaatagcaaaattatttttagtgttttgatttaaagtaatggtcttttgaagagtctgataaccaacataactaatttcaatttgatgctctccctttggaacagttagagaataaaaaccatattcattggtggtagtacccatttttaaggctggaatatagaggttaacgccaattaaagtttcattgtttttaaagtcggtgatggtaccgctcagtgtgaatttttcctgagaaaatgatgttagaatagcaaagaagaaaaataaaaaagcagttatttttttggtggtcattatcttggttttgagttacatagttaacgattcttgttaaatatttctacagaacgtttgttaaacattagttaagaatgactttttctctaaggttcaaaggtgtacaggtgtagaggttcaaagttttttagttcaacttacaaaaaaaagacaactgttgaaagttgtctttttaagggagatacattgttagatctctattattttatattactattttatttgagcaataatggagttgaatgtttcgcttggtcgcattgctttgctcactaactccggagttggctgatagtaaccaccaattgtttgaggttttccttgtgcaccaattaattcagcatcgattttagcttcgttagcttcaaattcagcagctattggagtgaagatcgcttttaattcagcatctttgttttgagcagccaaagcctgagcccagtagtatgcaaggtaaaaatgagagccacggttgtcaatctgacctactttacgggcaggagatttatcattggcaaggaatttatcattggcctgatctaaagtttcagacagaacaatagctttagaattgtctaaagtttgtcctaaatgctctaaagaagctccaagtgctaaaaactctcctaatgaatcccaacgtaagtatccttcttctgtaaattgctctacgtgttttggagcagaacctccggcacccgtttcaaacaatccaccaccgttcattaacggaacgatagataacattttagccgaagttcctaattccagaataggaaataaatcggttaaataatcacgtaaaacgtttccggttaccgagatagtgtctaaacctttaatgattctgtctaaagtaaattcagtagcagcaactgggtttaagatgcgaatatccagatttacggtattgtgatcttttaaatatttttgaacttttgcgatcaattctctgtcatgtgctctgttttcgtctaaccagaaaacggcaggagtatcagataaacgtgctctgtttacagcaagtttaacccagtcctgaattggagcatctttggcctgacacattctgaaaatatcattagtttcaacgttttgttccattaaaacagttcctttgttgtctgttacacgaacaactccgtcagcttttatttggaaagttttgtcgtgagatccgtattcttctgctttttgagccattaaccctacgttaggaacacttcccattgttttaggatcaaaagcaccgtgttttttacagaaatcgatagtagccgtgtaaattccagcgtaagagcgatccggaataactgcgatggtatcttgttgttttccttctttattgtacatctgtcctgaagtacgaatcattgccggcatagaagcatcaacaattacatctgaaggtacgtgtaagtttgtaattcctttgtcagaatttaccattgccaaagcaggaccgttttcgattgctttagtaatgtcagcttccacttccgcttgttcaggtcttcctgcaatttttgcatagatatcacctaaaccatttctggtgtcaatgtttaattctgcaaacaaagtttcgtattttttgaaaagatcagcaaagtatacttcaacgatagcaccgaagataattggatctgatactttcatcatggtcgcttttaagtgtaccgaaagtaaaacaccttcttttttagcatcagcgatagcatcagcagcaaaagcttttaatttttttacacttaaaacagaactgtcaatgatctcacctgctttaagcggagtactggcttttaatacagtagtggtaccgtcttttgcaacgaattcaatttttacatcgttagcttctgcaacagtaagcgatttttcacttccgtagaaatcaccgtttgacattgaagctacttttgttttagaatcagcagaccaggcacccatggagtgtggatttgattttgcaaagttctttactgctcttggtgctctacgatcagagtttccttcacgtaaaaccgggtttacagcagaacctaaaactttagcatattttgctttaatttccttttcagcatcattttgcggatcttcaggataatttggaattccgtaaccatgtgactgtaactcagcaatagccgcttttaattgcggtaccgatgcagaaatgtttggtaatttgatgatgttagcatcaggctgtgttgccaactgacccaattctgccaaagcatctccggttttttgagcagctgtaagaagctcaggaaaattagataaaattctgccagccaaagagatgtctctggtttcaatagcgataccagcagtacccgtaaatgcttgaacaataggtaaaaaagaataagtcgctaacaagggcgcctcatcagttaaggtgtaatagattttcgaattctgtgtcattttttttttttttttataatcgtatcgccagagaatggcaatgtaaaaggtatagtcggctcagaatgagcggagcaaatataataaaaacagtccgaaaacggtgtagttttgaggagaaatgccgaaattatcagattgttatttcgaggtcgtttaattgtcaaatcgacgattttggtattaaaaaattacggttttgatgaatcgtagaaaaaagaggatgatttcagaagagataaacctttgcggttgtataaaattagttaagtaatgtgtttttgtctgaaaaattgtacttttgatttaataaatgaatgagtaataaagtgtaagctacattgtttaatatgttttttacttattgtttgttataaaacttaattattatctttgaattatgagcacacttacaaaacaaaatcatatagggcgaaaaattagccgtattcgtgaacttcgagatatgaagcaagaagctttggcacaggctttaggaacaagtcagcaagctgtttctgctattgaaaacagtgaaacgatagatgatgaaagacttaaagaagttgcaaaagcgcttggagtaactgttgaagcaattaaaaatttttcagaagacaatatgattagttactttaatagtttccatgataacagttttacaaatggaacagcattcagtacaaatcattattgtactttcaatccattggataaattaatcgaaatttttcaggagaaagaaaagctttacgagcgtttgctgcaagctgaaaaagataaaatcgagtatttggaaaatctattgaaaaaatagagaccaattttcattaaaatacaaaccgatgctttaggagtgtcggtttttttattttgggcgtgtcccgccgaaaaaggcgggtcgggctatccgcttcaagtcctcgcacttccttcgtcaggctgtgggctttccacttctatccctcacgcaaacggtttcattagaccgtttatggtttgcaagattaagctggtaaaatctgtttttatcagcgttttcgctttagcgaatcagtaaaatcagtgtctaattttgacgcggatgaaacagatttacttcgtaaaaacgcagataaaaacggattttattttccaaaagattaacttaatgacattgacttcaagccgtagaataagaattttttgtttattaagcgcaattatttttacaatcttgtcatttcgacgaaggagaaatcatacgcgggattcggcaaagattgacgattttgattgcgtcccgaagctcaacagtaatccatatagtttgtcatttcgaggaacgagaaatcttcgcaagaaagtcaaaagtaaactaaaagcttttatggaaatgattgttttagccccgatagcagtggaaatccttttgtgtcggggttcggcacaaaagattacttcgtcagttcgcttcgctcgtgtgaaacggatagcgggattagctcctgaaaattttaaaaaacaggcaaaaaaaaacccgtttcaaatgaaacgagttttttataaccaatagataaatgattatcttcttttatctttaatcttagcttttttaccagtaagttctctgaagtagaaaattctagctctacgtacagctccttttttgttgatttcaattttttgtaaagctggtaagtttactgggaagatacgctcaactccaatagctccagacattttacggatagtaaaagtttctgtgttaccagaacctcttctttgaataacaactcctttaaaaaactgagttcttgttttttcaccctctttaatttcgtagtaaactgtgatagtatctccagctccgaaaacagggaaatcttttttagcaacgaattcgttttgaacgaactttaataaatctgccatgataatttttattattgtttatttagagtaacattcacgtatttcgccagaggttagtctaattcgggtgcaaatgtaaaaaataattgtaaattatgaattataaattgtaaattattttaagttgctgataaattgagggttagtgttcagtcacagtatacagttttcagtctcagtctcagtctcagtctcagtctcagtttacagtaacagtagtaatcaatacaataaaactgaacattgtatactgtatactgtgactgaacactgagtacttacttaggctgctgttgcgtcacacagtggatcattcctccattagcgtacaaattacgaacatcgataccaattacctttctgttaggatacaagctttgaattagttggttcgcaaccgcatcattaggatcattgtaattaggaactaatacaaccgtgtttccaatgtagtaattaacataagaacctttgtatcctaattttttaccataagccgttataactttgttttgagtcaaaggcagttttaggaaattgtattttttaccttttagatcttttgaattgtacaaagtaggaatgtctccttctggtacttcccagtacagtaaatcatcttcactcatcgttacgatggtgttgtcattaccaaatcgtgcaaacccgtcaatgtgcatgtcagtaatgtcttttcctgcttttccgttaagccagatgaagttagacactcctaaatattttttaaaaatggcttcagcttgtgcctgactcattccaggattacgatttgagttcagaatagagcttttagtagctaataaggttccttttccatctatttctacagctccgccttcgttgatcatgatcgaatttaaatctacaactgttgtactttgatctgcggcaatttgtgcaggtatggtgttgcaatttctaaaatcggctttttctccccagccattaaagccccagtcctgaattaccaattggttgtttttgtctcttacatagataggaccattatctcgcacccaaacatcatccgttttatagattttaaaatcgatagcagaaagagaaactcctgcattttgtaataaagttgtaattctgttcttttcgttggtattataagcaacgatatgcaccttttcacttgttgacaatgattttgtcatggctacccatgtagcatccaaatcatctctatagttaataccgtattgatattggtgtggccattgcagccaggttccttcatgcggagcagattcttcaggcatggtatacataatctcgcttttaatggattcagttggttcgtttggtgttgcagacattccgtcttcctggcaggaagtgaacaaaggaagtagtactattggtaaaaataattttttcatcttaatataagtttgttgtggattaacttgtttagtgtcattttgttactagtattttgacggtacaaatgtatttctaaaacgtaatccggcagttgtccaaaatggacaaatcaaataagcggaataaaaatcgctgtgagatagtcagattcgttatcacaattgtcgcttgttttcaggtattgttcaataacaggcaaatgtgaaagttcaaaatcatgggttagaaaccagccaccaaagatttgattatacgtttcttcaagggtgtggtagcttccatggtgaaaaaagcgagcatatttgcccccaaaaatttgcttctttggaagatttttaagaacagcagttgtcgcaatgcaggcttcgtaagtacaatttattttttcggtaattaaaatgtcatccgttattactccgaagaagtgagcatcagtttcaggaaattcattttttaaaagagtgtcccaaagattttctatttcgggattaatataatgtgttttagagctaaggtaataaacagctgtttccggaatggtgagtatttccggctttaaaacggaagtaaaagattgaagaatacccgtatcgtttaataaaagttctttttgattgcgggcaagcgaaggagcgcagtcgaaatgttttttgaaggtttttgaaaaagactgcacatcggcaaaacctacttcaagtgcaatttctgagatctgtttgttcgagtagatcagttttttgtacccattttctactttcaatcgggtttgataagcgccgatggtttcattaaataaagaataaaaaatgcgttgcaaattcctgtaggagtaacaggaaatacgctccagagaatttattgagatgatttgattgtaattcatctcaatataattccgtgtattgtaaatatgtttcagattaaaatcgctcattttttagcttttagaaagaagtaataaaaaaagataacgataattacagctttcaagtatgattgagaagaatcactaaaaataaatgaggagggaatattttttatttttcttccaataaatccggacgtctgtttttagtatgttcgtaggccatatcctcgcgccatttgtcaattttggcaaaatgaccgctcgttagtacttcgggcactttccaacctttataatctgcaggtcttgtgtatatagggcctgaaagcagattgtcctgaaaactgtcagtcaatgctgaagtttcgtcgctcaaaacaccgggaatcaatcggatcaaagcatcagataatactaaggctcctaattctccaccggataatacataatcgccaattgaaatttctttggtaataaaatggtcacgaacacgttgatctacccctttataatgtccgcagagaatgataatgttttcatacatcgacatcgtattggccattttttgatttagagtttctccatcaggcgacatatagataatttcatcatactcgcgctggctttttaaatgcgtgatacagtcatcaataggctgaactgtcattaccattccggcacctcctccaaacggataatcgtcaacacttttttgcctatttgtggtgtaatcacgtaaattatgaaaatgaacttctactaaacctttgtctatagcacgtttcataatcgaagcctcaaacggactctttaataattcaggtaaaattgtaataatgtcaattcgcatttcttttcttcaatagttctaagatgcaaagatacaaagttaatttttgtgaattttcaagatttgaaaatgagagaaaataattaagagactggttagaatgagttgctaaccagtgtgttatttgatggtttgtgtttaagtatttgttttacaggtgaatatatgatggttatataacataaaactaccgaaatgtaaaaaaaagctgcttaattttaagtaatattacggttcaatcgtctaaaaaaataaagtcccatgaaaaagctattcttactaacaattatattgattttacaggcatgtgcaacagctaaaaatccaaacgatcaatggatcggtcagtcaaaaaaaaatcttataaaggcgtggggacctcctatacgtactttaaatcacccgaatcatggagaaatactaatttatgcagatcaggtatatgcaaatacagatgcaagtgaagctaccagaattgctggtccaaattattggaattacacttatatatacacccataaggacgggaaaatttacttgtataaaaccgataaacaacagcagcctccacaaacgattgctgtaaaataaatagattgattgtttttttatcagaaaatagcgctgatttattactgcgacgaaaatcatttcagtatatttatgctgatcttaagtaacttaaaatgataaatcatgaaaaaaatagcaatgctaatggtgctttttctaattatttcctgtaacaatcaaaatcaatcaaaacctatggatgctacaaaaaatgaacaattaatcaaacagtatttcgaacattttaacaaccatgactggaagaagatgtcagaaatgtatacggataccgctgattttaaagacccttcgttagggccggggattgtaaaacaaacccgtaaacaaattgcagataagtatgtagaattaaatgctgcatttccggatctgcatgataaagttgttcaggtttatccatcgggagacaaacatattattgtagagtttgtttcaacaggtacagggcccgataattcaaaatttgaattgccaatctgcactatttttaccattgaaaacggattaattaccaaagattttacctatttcgataattttgaagaagaggaaaactaagggcagctgctaaccgtaaaaagaggtgttgtccctacgggacattgttgacggtagattacccgtattttgctcctgacggagcattttttttgctaataagtaaaataaattgagggaaagtaatatttatcaataaaatatttgtagctttattctttcattttaaatgatctaaaatctctttgcttttggggctttcagcccttttttcttgcgtgctttgcgtaaaccttcgcggactttgcggttaaaaaatagctcatggatgatttttaatctttttttttctttaaatattctttttatcgttgactgcgttagggatgggagtgatatccttttgcgatacccatacttctaaaaaaaaaactgaaacttctatcgcaaaagatttagcggacagcccgacccgtaggggaacgccataactatctttactatatttttgctcagtagaaattaatttaaaaatctgtgagtaatttttttttcgacggtttaaaatcagagattgtaatttcagataaaaatcatatttttactttagtgtttaattgatctaaaaatcggaatacgatgaaaaatgtcttttataaaggagattgtgatgagtttgtaaaacgtattaattcgcttcaaccggattcgaaagggctgtggggtaaaatggatgtagctcaaatgctggcacactgtaatgtttcctatgagatggtttacgaggatattcatcccaaaccgggtttctttttgaggtttattttaaagacattggttaaaaataaggtggtaagcgagacaccgtataaacataataatcccactgcatctcaatttatcataaacggcagtcgtgatttcgatcttgaaagagatagattgattgcttacattaataaaacgcaattgctgggtgaaaaagatttcgacggtaaagaatcgcattcttttggtagattaactgcgacagaatggagtaatatgtttgctaaacatctggaacatcatctgagtcaatttggggtttaattttatgctttgcttatgagaatgttctgtattatcagttcgttatttttgggattagctgtaaacgcacagcagcaggaagtccaaaagagtattgaaactttttttgagggttttcaccaaagagataccgtaagaatgaaatctgtttgtgcggataaaatagtcctgcaatctattagtgagagtttggttaaaggaaacaaacttacagaggaaaattcgggtaaattctataagtcaattgctaccatcccatctaatattgaattttctgaaaagattttaagctacaatattcaaattgacggaacaatagcacatgtttgggcaccctatcagttttatgtgaacgataaactgagtcactcgggagtaaacacttttactttgtttaaagaaaaagacaactggaaaatcatctatctgatcgataccagaagaaaataatgcttttatgcaatttcagttgcaaagtaataacaggagtctgccaatgtgcactcatcgcatttgggtttgggtctgcaggtttctcttcctaaaaaagaaattgccatcccaatttcagaccaaatggttttgggtaaaacctgcattaggtctttttctgttttaattccatctttactctctttgataataccaattcttggtgctacgcgtatgacgtgtaaatcggcaataattccttctgccggttgatgagtttctcgtaaaattacattggctgattttcttccaatacctttcaaagcggttaattctttcatggttaatggaatgtcttcatcattttgaaccgtttttgcaatttccaaaagccattgtgcttttgtgggataattacggactttgcttatgtaaggaaggaaagcttctgcatcggtttgagacagactttttagtgtgggatacttttcaaatagtgccggtgcaattttattgatgttggcatcagaatcctgagcagacagaacaaccattactagcaattgataagtattttgatagtctaaaggatgttttcttcctttatatttacttaggatgggttccagttttgtttcccaatttgttgtttctccaaataagtccatttttaatttctttagaattgaacaatagaaagtataactatcacaaaattaaggggttttgatgaaatcgagtgtttttttaatgacattttgattgccaagaatttttcggtgtcccaaaccttctgttagatataaagtcccatcttccagttgtttatgaatgtggattcctgctttcaccgaaacttcaggatcatcatgatcatgaattacgaggactggtagtttaactttctgagctgctttgtaagccgaaaaatcatccatttttacctgatacttcttttcaaaatggtcgcgcaaacgttcgcttatttctggttttagctctagcttggctacaaaatcatccaatatatcctgtactatatcaccactgccaattactattgccttttttacctttaatccgtctttaatcgcgtttagaaccgacattccgcctaaggaatggccgatagcaaattcaaaaggaccaaattgtttttcaatttctaaaattgaagcaataaattcagacataatcgtactttttccttcggattttccatgtgcaggagcatcaaaacttaccgttgaaaagccattttttaaaagttcatcggctattttgaataattgggttcctcttccggcccaaccgtgcaccagtaaaattttacgattacttttcccatattcgtacgtaaccacgcttttattaattacgggaacataaatggttttttgaatacttttttgctccatatcgaattcgcgttttggaactttatgttttacaggagttgtgaaaagttttgcggcataagtggtaaccagttttgccgaaaaaaaggcacaaattttagcggatgcaataataaacttgggaatttttagagatttagtaggattattttccttttttgacatatcaataatttttttctgagggctgaattctgtttattttttcctaaatttaaaaaaagataaaagtaacacattaatagatgtttactgaaaaaaagaattgagaaaatagtatttagtacgcatataaattttaagaatggaaatatttcacatcagtgcagagtgttatccaatggcaaaggtgggtggtttggccgatgtggttggcgcattgcctaagtatcagactaaagctggtcacgacgttcgtgttgtggtcccttgttacgatacaaaattcagaaaagaaaacgattttgaatctgttcattggggaactgtgaagctggggaattttaattttccgtttagtgttttgaaagaaacaacagataaattgggatatgagttgtatctgattgaaattaaagaattgttcgatcgcccaaatgtttacggatatgaagatgatattgaaagatttgtatcctttcagattgcggctttagactggattacagcacggaataaagttccggatgttttaaattgccacgatcatcacaccggattgattccgtttttagttcaatatgcatacaaatatgaaagccttagcaatgtaagatcagtaattacgatacacaatggtctgtatcagggttggtttggttttgataagctgttttatttgcctgagtttgatttgaaacatgttggtttcttagagtgggaccattcgattaactcattagcagtaggaatcaagtgtgcccatgctgtgactacagtttctccaagttacctcgatgaaattaataatgcagcaaatggtttagaagccctttttaaagctgttcgacacaaatcaaaggggattttaaacgggattgattttgaagtttgggatcctgtcaaagatcaaatgattgcgagtaattattcgatagatacttttgagatcggaaaacagcagaacaaagaaaaattgtgtgaggagtttgaactcgatcctgcaaaaccattattcagttttattggacgtctgtttgaggagaaaggaggggatttgcttccacaggcttcggcactggcattatctgaaaattttgaaaatattaatatactgattctgggatcaggaaattcgttgattgaagaacaattggttcaattgcgaaatgattataaagggaattacaacgtttttattgggtataatgaggcattagcacatttgatttacgcaggagcagattttattttaatgccttcgagagttgaaccttgtggcttaaatcaaatgtatgcgttgcgctatggaacggttccgattgtgagaagaaccggaggtttgagagatacggtaatagattttggcgacgatggtaatggggtgtgccatgaccaggcttcggtaggggatatttgttattcgatcaatcgtgctgtaaaattatacggggataaaattagttttaaaaatattagagcgaaaggaatggggacagatcattcctgggagcgtgcatgccaagaatacatcgagatatacaacctaataattgagaaaaatgaaatttaagaagaagaatgtagttgccattattttaggaggaggacaaggatcacgcttgttcccattaaccgaaacccgatctaagcccgcagttccaattggtggaaaataccgattggtggatattcctatttccaattgtattaattctgatatttttaaaatatttgtcctgacacagttcaattcggcttctctaaacgcacatattaaaaacacttttaattttagcatctttagccagtcgtttgtagatattctggcggcagaacaaacccctgataatccaacctggtttcagggaacagctgatgccgttaggcaatgtatgtcgcattttttaaaacacgaatttgattatgccttaattttatccggagatcaattgtatcagatggattttaatgaaatgctcgaggctcacattgctgctgatgctgcgatttcgattgcgacattaccggtgaatgctaaagacgcacctgagtttggaattcttaaaaccaatcatgagagttttatcgaagcttttatagaaaaaccccatgcttcattgttacccgaatgggaatctgatgtaagtgaacacatgaagaagaagggaaaaaattatctggcttctatgggaatctatattttcaaccgtgaattactcgtagaactgatggctgatccggaaacaaaagattttggaaaagaaatcattccgcaggctgtaggcaaacataaaattctgagttaccaatacgaagggtattggaccgatattgggaatattgaatctttctttgaagctaatattggcttaacaaccgatattcctgaatttaatttgtttgataacgacaacaaaatttttacaagaccccgattattaccaccgtctaaatttagaaattctaccatcaatcaatcgttgatttcggaaggatgtatcattaatgccaaggaaattaaaagttcagtcattggaatccgttccagaattggagagggaactgtattagagaattgttatgtgatggggaacgatttttatcaggatctggacgaactaaatcgtgaagccgcaatccataaaattcatgttggtattggtgaaaactgtttcatacaaaatgctctgattgataagaatgtcagaattggaaataacgttcacattagcggtggaaaacatttggataattttacgaatgagttgtacagtatcaaagatggtattgttgtgattaaaaaaggagctgttctctctgataattttagaattgaataaaatgcttagaattaattattgccttaaaaaccaaatatgtcgaaagtaattacgcattctctctttaccgaatttgatattaatttattcaaagcaggaaaacactaccagttgtacgaaaaattaggagcgcatttaattgaagttaatggggtaaaaggagtgtattttgccgtgtgggccccaacagcgcaatcggtttctgtggtgggtgattttaattactggacacagggcgaacatgctttacaggtgcgttgggattcttcaggaatatgggaaggatttattccggaggtttcaaaaggaactttgtataaatataaaattcaatcgaatattgacggaatcgttaccgaaaaagcagacccatttgctttgtattgcgaaaaaccacctcataccgcttctgtggtttgggatttggattataactggaaggacgaaaaatggatgcaatcacgtcaggagaataatgcattagataaacctcactcggtttatgaagtgcatttgggatcctggaaacgtggcgaacataatcgctttctaacctatttagaactggcagatgatttggttgagtatgtaaaggaaacgggttttacgcatgtagaatttatgccagttatggaatatccttacgatccttcatggggatatcagctcacgggatattttgcaccgacttcgcgtttcgggaaaccgcaggattttatggttttggtagataaattacaccaagccggtattggcgttattctagactgggtgccgtcgcattttcctgatgatgcacatggtttaggcttttttgacggatcgcatttatacgaacatccggatcgtcgaaaagggtatcatccggattggaaaagcttggtttttaattatggacgcaatgaagttcgcgctttcctcatcagcaatgccgttttctggttgaagcattaccatgccgatggtttgcgtgtggatgccgtggcgtctatgttgtatctcgattattctagaaacgaaggggagtgggaaccgaatatttatggaggaagagaaaatttggatacgataagttttcttaaagaattcaatgaagtaatctatgctaattttgatggagttcaaactattgccgaagaaagcacgtcgtttcctatggtttccagaccaacgtttacaggaggtttgggcttcgggatgaaatggatgatgggctggatgcacgatactttaaagtactttcaaaaagaaaccgtttaccgaaaataccatcagaacgagctgactttttcgatgacttatgcttttaccgagaattttatgttgccgttttcgcatgacgaagtagtgcatggaaaaaaatcgattgccaataaaatgccgggtgatgaatggcaaaaatttgccaatttaagattgctgtacggttatatgttcacacatccgggagctaagttattgtttatgggatctgaattcgggcaaagtgatgaatggaattttgaaaaaagcctggattggcatttactgcaatacgactaccattccggaattaaaaaagtaattacagatttgaatcaattatataaaacccgtcctgcattgtatgaaaaacaattttcgggagaaggttttgagtggatcaattattcagaccatcagaatgcggttttatcgtacattcgaaaaggaaacaatccgaaagagaatctgattatcgttggcaattttacgcaggtagtgcgtgaaaattacataataggaatttcagaaaaaggtaaactgcaggaaatttttaatagtgatgctgttatttatgaaggaagcggtgtaggaaatccgcaggcattaacaatagagtcatcgccatatgatgggagagattattccgtagctttaaatttaccgcctttgagtatcacagtgtattcatttgtttagatggcacacagatgacaccaatttagactgataagcagagattttacatttagaatgtttaaagtcagtattgtatagttgtattattagttcgtttagcagatagtcctataaaatagttgataaggatcaggcagattttggtaaaatcattttaattctttcaatctgtggcagataaattggttttagtttgtgcaattcgtggcaatagaaagtaatttatattgatgtcaatgaaaatccatcaaatgcgtctcatccattcgtattattgagttatttgtccgcttagcggacagtcaatatattattttatcagtttcacgttcttagattatcgatttgttgaatttttaagaagatatttaacactcattcagaaaaaacgttttcgtgaataatccttttatttatagaggtttataatgtttttttgtatgtttgaaagggagactagcgttatataattaatacagaaatcgacatgattacaaatacagcattagaatacaagggcgatttatatccatcaaaaattatctcgcatcaacatgaaggagattctgttttttttcatactgacaataaagtaatcttaaaagtcactattcttagagacagtttgattcgctttcgttttacaacaaaagggtattttagtaatgatttttcgtatgccgtcgataaaacacagcttcacggttacaactttttagagctcacagaagaagaagcttatttccaaatcagaaccagtaaagtaaaatgtaaaattcaaaaaagagatttgcgtctcgctatttacgatttaaacgattttcttattctggaagatgaacttggttttcattgggaagaaagttacgaatacggaggaaatatcgtaaaaatgagtaaatcctctaaagacggggagtgtttttatggtttaggagacaaagcaacacaaatgaatctaaaaggcaaaagacttgagaattttgccaccgatcaatatgcttaccaaaaagaacaggatccgttatacaaagtggttccgttttatattggtttgcacaacaaattatcttacggaatcttttttgacaataccttcagaaccttctttgatttttgtcaggaaagaagaaacgttaccagcttttgggcagaaggcggagaaatgaattattatttcatttacggtccgcgaatgcaggatgtagtaacgacttataccgatttgaccggaaaaccggaactgccgccgctttgggttttaggataccaccaatgcaaatggagttattatcccgaaagcaaagtaaaagaaatcacttcaaaattcagagaactcaaaattccgtgtgatgctatctatctcgatatcgattacatggaaggattccgatgttttacctggaacaaaaactattttcccgatcctaaaaaaatggtagccgaattggccgaagacggtttcaaaacagttgtgatcattgatccgggaattaaaatagacaaagagtattgggtgtatcaggaagccttagaaaaagattacttctgcaaaagagccgatgggccttatatgaaagggaaagtttggccgggcgaatgtaattttcccgattacacaaaccccttagtaagagagtggtgggcggggttatttaaagaattaatttcagatattggcgtaaaaggagtttggaacgatatgaacgaacccgctgtaatggaagttcccaacaaaacatttccaacagatgtacgtcacgtatacgacggaaatccatgcagccatagaaaagcacataatatttatggcacacaaatggctcgagccacttatcatggggtaaaacgttttgtctaccctaaacgccccttcgtgatcaccagatcagcctattccggggcacagcgttatacttcttcctggacaggcgacaacgttgctacctgggagcatttatggattgccaatattcaggtacaaagaatgagcatatccggaatgggatttacaggttctgatattggaggttttgccgaacagcctaccggagaattgtacgcccgctggattcagttaggcgtattccacccattttgcagaacgcattcttccggagatcatggcaatcaggaaccgtgggcatttgatgaagaggtcataaacattacccgtaagtttgtgagcctgcgttatcagttactcccatatttatacaccatgttctggcagtatattgaagaaggagttccgatgttaaaacccttagtatattacgatcaggaagatacccaaactcattatcgtaatgatgaattcatttttgggaatcaaattttagtatgtccgatactcgaaccaaatgctgtcggcagacgaatgtacattccaagaggagagtggtacaattactggaccaacgagtttgcaataggaggaagagaagtctggattgatactaaatttgatgaaattccggtttttgtaaaagcaggcgctgttattccgaaatatcccgtacagcaatatgttggcgaactagaatttgatgaattaacactcgatctgtattttaaactcggaaaagaaaagtcagtcgtttacgaagacgcacaggacggatacgattataaaaaaggacgttacagctttttatctttcagaaccatcggaaaagaaaaagaactgatcattcagttgcacaaagaaggaaagtatgatacaccgtacagtaagtataaaatcaatttaatcggactgccttttaaagtgacagaaattgaaatcgataatgagaaaatcgcatttgacaaggaaggttttgaacttaatcattttttaattgtggataaagagttcaacgaacttcatattgttggggaatagtataatcctgatattttttttggtaattatataaaagtagaaaaattaataatcgtatttttgtatgttgttataataccactatcatgagaaaacatctagcatcaggcttacttgccgttgttttagcggccggttgtgcgaccaatcccatcacaggaaaacaaagtttgaattttgtttcaaacagtgaattatttccatcttcgtttcagcaatacaatactttcatatccgaaaacaaggtaattacgggaactgcagatgcgaaaaaagtagaattggtaggaggaagaattaaggcagcagccgaaaaatacctgatctacttaggacaatcgcagtatttgaaagattatcgttgggagtacaaacttgtagacaataaagaggtgaatgcgtggtgtatgcccggaggaaaaattgtggtatactcaggaattttaccaataacacaaaacgattccggtttagctaccgttatgggacatgaggtttcacacgctttagcaaatcatggcgcacaaagaatgagtgccgcacagttacagcaaataggaagcgtcgctttaggagcagccacaagcggtaaaacccagcaaacacaggaaatatttgcacaggcttatggtttggggactcaggtgggagtaatgttgccgttcagtcgtagtaatgaaacggaggcagataaaattggcctaacgttaatggccattgcaggttacaatccggatgatgctatttcattctggagcagaatgtcagccaaatccggaggatcgggaacaccggagtttatgagtacacacccttcagatgcatcaaggattgccaatataagagctttaataccggaagcaagagcgacagcacttaaagttggaatcattaaatagattttttacgataaaataggcaaagctatcctttttagggtagctttttttatgctgataatttattaatacatgaattactgaaaattgatttgattgtaataaaaaagaaataaattcgtagcctgttaacaaaaccattactatgaagaacctacaaaaaggagataagaaattattgaatgcctgggcattttacgactgggccaattcggtttatacactaacgattgcatcggcagtatttcccatattttatgaagctttatttactgaccgagatcattatattgatgtatttggaatgcatcttaaaaattcggccttaattagttttattaccgcagcagcctttttggtagtatcttttatctctcctttattatccggaattgccgactatgtggggaacaagagagtatttatgaaattcttttgttatatgggagccttgtcttgcatgggattgtattggtttgatctcgagaatatttatgttggattggctttttatttcttaggattgctgggatattggggcagcttggttttttacaactcctatttaccggatattgcttttgaagagcagcaggacaaaattagcgccaaagggtactcgatgggatatattggaagcgttattttgttagttatcaatcttgtgatgataatgggggcagaagacgatatagccagaatgaaagccatgcgctattcgtttataatggttggggtttggtggattctattcagccagtatacctactattatctgccaaaaggaagtaaagcgagtggtcagaaattaactacttcagttgtttttaatggctttaaagagttaaaaaaagtttgggctttgctaaaagataacattgctctaagaagatatttaagcggattttttgtttcaagtatggcggtgcaaacggtaatgcttgtggcgacttattttggagcacaggaaattgagtgggcaaccaaagaagatagtaccattggattaataaaatgtattttgatcatccagttagtagcagttgttggagcagttttaacctcaagagcttcggctaagtttggaaacattccaactttgattgttatcaatagtgtttgggctgtattttgtgctttggcgtactttatagtattaccaatgcatttttatgtgatggctaccgttgctggatttgtgatgggaggtattcaggcattgtcccgttcgacttattcaaaattattaccggaaacagaagacaccgcttctttctttagtttttacgatgtagcggagaaaatcggaattgtaatcggaatgtgtgtttatggtatcatcgatcagatcaccggaagtccgcgtgccgcaattgtgattttggccatcttcttcgttactgccattttccttttacgaagagtgccaaaaaaggcactttaaaaagctgctctgtgaatgaagtataatgaataacacgaattgtcactaagcattggctcgccttttagaatttgtgcaaattcgtggaattcgtgttcaaactaaagctttaaaaagttcctctatttttattttatttagatttaagctgcgcattgatttttacaagcatttgtacagcattttcgtttttaggatttaactccaacgattttaaataattctctttagcaggaactaattgtccaatggcttcataaatttcacccaagctgtcaaaagcattcgcagaagccggatattcggaacaattaagagcaaaaatctgaaccgaaagatccgttagtttcttattaaataaattataaccaaaattgtttaaatcgtcttcaaaattgtaatcaggatattttaatcttaattttttaaattgattgacagcagtttcaaacgtattctcactgaatatctcaattaactgagtctgaggtgttctgatttgttccaagctaagctgcaaaaatcgcgtggtactagctgcacgtgtgatcgttatggcttgtaatttatggttgagtaagttaaaatgtatctcgttgggataattatcgattttaaaagtattgtttcctaagtaatgcatcttagttttttcagtatcaaaattctcttttaaaaatggagagtaaagataaagactactattttcttcctcaattttagaggttcccattccgtcatatccatacagaaattcagtataatacccttttatggcattttttaattctgatggaattttgattgaattcgtttttatagactttgcccagtttagttttgtgatgacttctttttcgatgtacgccattacgggaagcctgttaggtttatcaccattggctaaaacgacaattccgttaccattcttcatggtagcaagtaactctccgccggttccggtattagagccatcatgcgagaaccagtccagatttccgtatccaagactgcgctgccatccgtaactccatcctcttggacctttcattgtcaccaggtttgtaaccttttcagccacagctttagaaattacttttcctttacccgcaagtgctttttgcaattcaatcgcaattaaggccagatcagtaggagtagaccacaatcccgaaggtgcaacttgtggcgttataggaattcctgttcggattattttaccattactattatgtactttagcagtatttgtcagaaaaccattttcattgggctgaatcatggttgaattctgcaaatgcaaaggatcaagcaactgttctttgacaatttgtgccaatggctttttgaaatgatcttccagagcacattgaataactacataaccgccaccgctatattgccactcggtttcaggtttgaaaagaaattcgataggctttttagatcgggttaataatttaccctgcagactttctacaattgagggaatggaatctccctgataataatcttcgaaaccgccctgacttgttccggctgtatgagataaaaggtgtttccaggtaacgggtgttttttgagtaaagtcgcttttaggcaattgccatgattttagatactgagagataggggcattaaggtcgattaatcctttttcctctaaaattgtacaaacaatagcgacgataggctttgaaatggaggcagtagaaaaagcagtattcaaatcaattttttctcctgtatccgctgcttttacaccacattgattcgtccagattactttgtaattttcaaaaactgcaacacttaatcctttaagattgtattttgacatcatttctggggtaccattttttaagctgtccaaagatttgattttttcagaaatagttgtttcctgagaaaaggaaaaggtataagaggtaatcagaagtaaaactaaaaaagtttgtttcattagtaatgattttggattgcggtaccgctttgaaagtataaggctcaataataaaagaaaagtaagctgtttgttctttgatttgatgatgataaatattcttttattattgagcttttatagaattaagcttttgagatacttcctgatcccgaaacttttacacttcttttttctggatttccgctgtatctgacatcgccggatcctgaaacttttgcacttatactttcagtacagtttacgcgaacgtctcctgatcccgaaatggttacttcagtattttttgttttaagatttgtggcatcgatatctccggaacctgataatatggttgaaaaattcgctgcatttccttttaaatttacatcacctgatccgcttaaaataaattcaagatcgttggagtctaaagtcagattaaagtttcctgagcctgataatcttgccttaaatttgtcacttttaattggatttttagtgcggatgtctcctgaacctgcaaggctcaattgagatatggtttcaaaaggtatcgtcatttcgatcttttttccaagacttggggagagattaacgcctttctcaacgtaaacttttaaaatattattctccacttcaacttttatggcggccaataaattttgttccccttccagtgtaatttttccttctttccctgctactaaatccacatcaaaaaaaccggaaatttttataccatcataatcagaagtggttctggtttcagaaacgacattgccatttccttttatctttttattagaccattgagcatttgcaataaaactgaataaaaatgcactgcaaacgaataatttaactgatgttttcattgttttgattgttttagattgttattttttgattaatgcagcattaccatagctggtagttaccgttattttgctttgtccttttttcttgttgtaaccgcttatttttttagcactgcctttgctttccgtcaccgatgtttctaatgaactgtcgtacttgatactcccatatctggtgttaatgtcaaaatcaaaagaaagatcagcgctgtaacccagtgatacattcgtgtagctgctcgtaacattcacattcttttttttctcatttagagtatccacatttatctttgaataagcagtgtcaatattcaaattaccggtgagctccccaacagaaacacttaagtaatttccggaacccgtcagcgaactgattttttgaagtttaaaagtagagtaattactatcgtatttaatattctggccttcatcaagcaaatacaaatcagtgtaattggagtctatatttaagtttccggaatgtgttattttcaggttagaatagcgcgcttcaatatttccgtttttgatagattcaatggttgagttctcgcaatagccaatttcaattcgattgctggaaccatttagtttccctaacgttatttttccgtatttacaagtaatatctgtggtagattctaaactcagcgttgtgatatctccatacttattattaagttttaccgaaccgtttttcggaatcttaatgacatagttaatttcaaagaaatcagcacttcctttacttcttaacgaagaatttccaagatttgtcactgcagtaaccatcgatttaagggcagtaatgtcaacatcaatactgttaattctttggtttgcccaactttcatttttgctggttgcctttatagtaatgtcaatgtcgattttatcctcattccaggtactgaccgtgatgtctccgtatttgttgtcaatatcaatacctgcgttcgaatttacgatataggtttttttaatgttcttttgcttagtgatgtaactattatcatcgtttgagaatcctaaaaaaggaagcaaaaggaataggatgagtattttataatgttttttcatgtgtagtgttagttttaaaattttcattttcttcaatgcgtttcaatactgtttgtaaaaaggaaatacgtgtttccaggttactgatcatggcataaataatttgtttgttttcgccgtttttctgcaattctttcatgatttttgcataatcggtatcaaacaccttcatttgttttaaggcatcgttaataatctgttcattctgaggagaacttttttcttttaattttactagctcattatcgattaaaatactgaatatcgaatcggttcttttggcttcctttgaagcaaacttatactgtttaggctcctggtaactgttgtagaatatagatacccccaacaataccacaattgaagcagcaatggcccagaccgcatgatttttcttcttaggttgttttttgtttaatttatttaagaaatcaagctgatggtcagaagttaattcggctacatcccattggttctcaaactttttgaataattgatctaaatcgtcattttcctttttcatatctcctctaatttttttcgtaaactttcttttgctctgcttagcgtcgtccggcaattagcataactgatgtttaatatttcactaatttcctcctgatcataaccctcaatataaaaaagggttaaaaccatacgataattgtctttcaggtttgaaatcgtatctaagacttgttttactttaagtgaattcaggtcaatgctgtcacttaatacactgtcattttcctctattttataaagggttttagtcaaatcttctgcctgaaaagcattattctttttataaaaatcaatactgtaattgatgattattctttttaaccacgcaccaaatgctacttcttgtttatagtcattgatttttgtaaaagctttcagaaaaccttcctgcatgacgtcctgtgcaaaatgttcatctttcacaatgcggaatgccacattgtacatcgctttacaataacgattgtaaacttcgaactgcgctttttggttgttctccttacaaagcgtgattaattcttcgatattctggttagttatactcaagtaattgttgctagtttttaataatgactttgcttttttaggtttgttacagttttgataaaattaattttatttttttttaaaataattgtctttcttaggttatttaacttctatcatacaatttcaaaactttcttttttgcttttggcacaatgattgtctatttttaccgctaatcttgtaaatgaaatactttgcatagatttagctaaaactagcgcctgtaaagttatatttgcggttagtatgaaatatttaatgacaaaacgacttatatactattatgtcaaaccataaaatactcacaattgacaatctgtcacttcaggaatttgactcagaagcagatttgattccattattaactccggaagacgaagaggaaatgaataacgaagagcttccgctctcgttgcctattttaccattgcgcaataccgttttatttccgggagttgttattccgatttcggcaggaagagataaatcaatcaaattaattaatgatgccaatgccggcggaaaaattattggtgtggtttctcaaattaatgaagaagacgaagacccgtcaaaagatgatattcataaaattggaaccgtagcaagaattcttcgcgttttaaaaatgcctgatggaaacgtaaccgtaattctacaaggtaaaaaacgttttgaaattgacgaagtagtttcagaagaaccttatatcactgccacgatcaaagaagtttcagaagaacgtccgacagaagatgataccgaatttaccgcaattttagattcagtaaaagaactggcgattcaaattataaaagaaagtccaaacattccgtcagaagctacttttgcgattaaaaacattgaaagccagtcgtttttaatcaattttgtttcttccaatatgaatttatccgtaaaagaaaaacaaggtttgttatcgataaacggattaaaagaacgcgcgcttgaaactttgcgttacatgaacgtggaactgcaaaaattagaattaaagaacgacattcagtcaaaagttcgttttgatttagaccagcagcagcgtgaatatttccttcaccagcaaatgaaaaccattcaggaagaattgggaggcgtttcgcaggaggaagaaatggatgaaatgggattgaaagccaaaaccaaaaagtgggacgagaaaacgcagaaacatttcgaaaaagaattgtctaaaatgcgtagaatgaacccgcaatctcctgattttggaattcagcgtaactacctggaattatttttagaattgccttggggtgaatattctaaagataaattcgatttaaaacatgcacaaaaagtattagataaagatcattttggacttgaagaagtaaagaaaagaatgattgaacatttggctgtattgaaacttcgtaacgatatgagatcgccaattatttgtttgacaggacctccgggagttggtaaaacttctatcggtcgttcggttgctgaagctttaggacgtgagtacgtacgtatttccttaggtggtttacgtgatgaagctgaaattcgcggacacagaaagacttatatcggtgctatgccgggacgaatcattcagagtttgaaaaaagccggaacttcgaaccctgtttttatactggatgagattgataaattgtcaagcggtaacagtggagacccttcttctgctttgttagaagtattagatccggagcaaaacaatgctttttacgacaacttccttgaaatggggtatgatttgtctaaagtaatgtttatcgcaacttcaaacaatatgtcagccattcaaccggcattacgcgacagaatggaagtaatcaaaatgtccggttacaccatcgaagaaaaagttgaaattgccaaaagacacctttttccgaaacaattagaggcacacggattgacagctaaagatttgaccattggtaaaaaacaactggaaaaaatcgtagaaggatacacacgcgaatccggagttcgtaatttggaaactaaaattgctcaggtcattcgtaatgcagcaaaagcagttgcgatggaagaggagtacaataaaaaagtaaccgacgaagatatcgtgaccgttttgggggtaccaagattagaacgcgataaatatgaaaacaacgatattgcaggagtagtgacaggtttagcctggacgagtgtgggtggagatattttgtttatcgaatctttgatttctgaaggaaaaggagctttgaccattaccggaaaccttggtaatgtaatgaaagaatcggctacaattgctttagaatacatcaaagccaatgctaaaaaattaggcttgaatgttgaattgtttcaaaagtacaatatccatttacacgtacccgaaggcgcaacaccaaaagacggcccaagtgccggaatagccatgttgacctctttggtttcattacttacacaaaagaaagtaaagaaaagtttagccatgacaggtgaaattacgcttcgaggtaaagtcttaccggtaggcggaattaaagaaaaaatcctggcagcaaaaagagccaatattaaagagatcattttatgtcatgaaaataaaagcgacattgatgaaattaaagccgaatatttagaaggacttacttttcattatgtgaaagaaatgagtgaagttttggctttggcattgacggatcagaatgttaagaacgcgaaaacgctgaaataaagtatatacttaatcttcaatacaaaaattccaaaatccaaattccaatctgagacctcagttttggaatttggatttttttattggaatttatttttatcgtattttatttttataattgatataattttatcttcgcacttgcgttatccctctataggatcgccccaaaagaatgttaaaacaatttgttttatttttattagtaacaatttgctccattagttatgggcaaataggagggcgtcacacctatcagttcttgaatttaacgacttctccaagacaggcagcgttaggaggagaaaccatcacgatttatgacgaggatgtcaatcaggtgatgtctaacccagcagctttaaatgaagatatggacaatcgtcttgctttgaattatgggagttattatggagaagcttcttatggaaccgcttcgtatgcctatacttacgacagacatgtgcagacattctatgcaggagtaagctatgtcaattatggttcatttgaaggttatgatgaaaatggtcaggccacttctaattttactgggagtgagggcgcactttcattagggtatgcttataatgttccttatactgatctgcatattggagcaagcgccaagttaataacttcaactttagagagttataattcgatgggaggagcaattgatttaggttttttgtatgtaattgaaaaaaatgatgtaaatttgggtttggtaatccgtaatataggtacacagtttacaacgtattcgggaataaaggaaaatttaccatttgaaatcgtggctggagtttctcaggaattagagcatgtgccccttcgctggcatcttacattagaaaatttgcaacagtggaacatctctttttcgaatcccgttcgtgggggaaccggcatagatggatcaacaaacaaagaaaaagtttcgtttttaaacaacgcattaaggcatgttgttttaggagtggagcttttcccaaaaaaagcatttaatttgcgtttaggatataattttagaaggggagaagaattacgggtgaatgaacaacgtaatttttcaggagtgtcagtaggatttggattaaaaatgaacaggttaaaatttaactattcttattccagatatacgttagcagcaaatacaagtctttttggtctaattttaaattttcagtaatgatatgaaaatacttagtttgtttttgtttttaacagtaggtgtttttacgggtgcaaaacactactataaaaaagaaaccgctatttccactttggaagtagagcgtatgaatcttagagtaaacgaaataaaaaacatgatgagtattgattctaaatacaataccaaaattgcttttttcgttgatatgagcataccatcaggcaaaaatcgtttttttgtttacgatctggtaaacagtaaaattatcgatcaggggcttgtagcacatggttcaggatcagaaacgggtgtaaaagggaatttacgtttcagtaatactcctaattccaattgcactgctttaggccgatatgtgattcagaaatgttataaaggaatcttcggaaaagcctataaattaaacggtctggatgaaaccaataataatgctttaaaaagagctatagtgttacattattactcggcagttccttatgaagaacaagactattacatcagtaacagccatggctgtccaatggtgaatgaacagttctttaaaagactcgaaaaatatatagattgttctaagtcaaatatcattctggatgtttattattagaaaaacttagaataaaatttcaatacacttaaatcttatattgctgttgtttttccttcaacagcattttttttgcctcgattttatctgtttttccaacttaattcattgttttagtattgtaatatgaagaaaatctttattggtttattggttttacttttgattttcgcgggatatagaatcctcaggaaagaccatactgcatctccttcagtagcaagaacaattgatattataaaaataaatgaagtccggagcattataaaaaacaatccaaaatacaatgacagatatgctttttttatagatatgaaaattccttccggtaagaatcgcttttttatatacgatctaaaaaataataaaattattgataaaggtttagtagctcatggtttaggatctgagactaaagtaaaaggtaaactaaaatttagtaatgtccctaattcactcagtacttcgttggggagatatgctgttggcgggcattataatggaaagtttggcaaggcctataaattatacggattagatactacaaattccaatgtatttgatcgtgatattgttttccattattattttgatgttccgtataaagagcaaaaaggatatatttgcaacagctatggatgtccgatggtgaacaaaaagtattttgaacgagtggctaaaataattgatacttccggatccgatattgtgatgagtatttattattaagtccgaaccaaaacagtaaacaagtttaaattaaaaaaataaaaaattgaaaaaaattaccattgcaattgatggattctcctctacaggaaagagtactttggccaaacaattagcgaaagagttagaatatgtttatgtagatactggagcaatgtaccgtgccgtaacgtactttgccatgcaaaatcagcttattgcagccgatttttttgataaagtagcccttatagcggctttaccgaacattcagttagaatttagatttaatgccgatcttggttttgccgagatgtatcttaatggcgaaaatgtggagaaacaaatcagaaccatcgaagtttccagtttcgttagtaaagtagcagaagtttctgaagtacgttctaaattagtggaacaacagcaggaaatgggaaaaaataaaggtattgtaatggacggaagagacattggtaccgtagtgtttccaaatgctgaacttaaagtattcatgaccgccagtgccgaaacccgtgcacagagacgttttgatgaattacagcaaaaaggagataacgtttcttatgaagacgtcctgaaaaatgtagtcgagagagattatatcgatacacatcgtgaagattctcctttaattattgccgatgatgcgatagaaatagataattcttacttaaacagagaagaacagtttacagcagtactggaattagtaacagatgttgttaaaacaatttaattttttgtagatatcatttttaatggtagttttaccgcttcatttattttaaagacaatttcatcatatgggaattaaaaacaggttgattataatgagctttcttcaattttttgtttggggagcctggcttataacaattggaaattattggtttggaactaaaaactgggaaggaacccagtttggtttggtcttcggaaccatgggaattgcttctttattcatgcccaccttaaccgggattattgcggacagatggattaatgcagaaaaactgtatggtgtcctgcacattttatatgcagtagttttatttactattgcacatattaccaccccagatcattttatatacgtaatgtttgctgcaatgtgttgctacatgcccaccattgctttgagtaactcgatttcgtatacttcgctaaaattgaacaataaaaacatcgtaaaagattttccacctatccgtgtttggggaaccgttggttttattgccgcaatgtggatcactaatttaagtggaagtaaagcgacagaatatcagttttacatcgccggtgtaggtgcattaattcttggaatttatgcttttacattaccaaaatgtgagccacagcgtctgacaaaagaagatgcttcactagttgaaactttaggattggaagcttttaagttgtttggaaactacaaaatggctctgttctttgtattctctatgtttttaggcggggctttacaattgacgaatgcttatggagacgtatttttagacgaattcaaacattttcctaaatatgcagattcttttgtaatccagtattcgactatcatcatgtcgatctctcaggtttctgaaacattatttattctcgcaattccatttttcttaagacgttttggaatcaaacaggtaatgctgattagtatgttggcctgggtactgcgtttcggattatttggttttggagatcctgtaggcggtttatggatgatcatattgtcatgtattgtgtacggaatggcatttgatttcttcaatatctcaggttctttatttgttgaaagcaatacggattcgaaaatacgttcgtctgcgcaaggattatttatgatgatgaccaatggtgtaggagccgttttaggaagtttaacttcaggttgggctattgatcgtttctttaccaaatcatttgcaaatactactgagttagctggatttttgcaaactgacagcacaaattcaataatgttggaatttgtaaaaaagcaaggtaattctgtttctagtgatggagtttttgctaaccctatattaatgaaagactggcaaaccatctggctgtcatttgccgcttatgccttagtaattgcaattgcatttgcgattttgtttaaacacaaacatgacccgaaagaattagagaatttaagtcattaaaaatataagacactgtctgagatcccgttttcaattgatgaaaacgggattttttttgaaataagccgcatcgttaattgacttcgatgcgattaaattgaaacagctcatttttggcggattttgctgtaatatagtattgtccaacaggcaaatcaatttcaattgtgttgttttttggagctactaagatagattgaatcggaattagtaaatctgcatttttagtcacattatactcttctaataggaaaacgtcaaccaatagtgcttcgtttttaaattgtgagagcttctggtctttcagattaacttttttaaaagtctgattagggtaaacagactgcaggttcgcttcaagattattgattacaaaataatcagcacttgatttcattaaagtatcttttgcaaatacagctttaggaagtaaaactagtttttcttttgtatccatcataacagtttcctgattgatggtaatgggatctatgttcgagtattcctttaaataattggccataagacgcttttttcctacttcttccagatgaccatgacctacataaatgaaaatttttgcctttggatctttttccagtattctcatgatatttttagcttgacctatttcccggtctaccttctgatcagaattttcatgccccactaaagtaaatcccatagcatttgcttttcttacgaaatggccgaaataagggtctttaatataaaatccatttctagcatttggaacgggcgctgtattggtactatagtttggaacaaaggtctccatagaaatcacagtgaatcctttttgttttaaaacatccaaaagatttagtgcaaacaaccgatgtttgggataaaaatgatcctcattgagtataataatctgattgctgttagcgagatctgcaattgctgcgattacagattcgtctcttttgacctcatttttagttagagaatttagaacagtttgtttaaaatcacttttatcgctttcatgttctttaagcagtaaattatattctttattattacctataaatgaattgatcgtcaggtataaaggggtctttaacattattttttttggatcttttataggtacctgctttattttttctcttccctgcaggtagtttttatgagattcagaggtataataattaaatagctgcatataagacaatttattcaaagaggtactgtccagatggacccttcggatattttcgctagccttttccaaatgattggaattaccagacattcgtgtaagtgaaatgattttttttgctcccttttgtttttcaaaaattataatgccattgatactatcatttcgaactaatttttcgtgaacaatagtgtcagttggtttttcaatcttttcaaagaaataatagctttctaaattttgattcgttttataactaagtattgcctttgcggcagatatatctttataattcccaatttgcttccttagtgtacttctattaatcttagaaagatctttatagctcacattttccggtatgtcgatggaaacatccagtaatgtattgtagaataaatcgcctttgtttttatcgccggcaatataattgtgctgtataacattttgctggccggttttgcacccaaccaatagtaaaaaacaacttgcggaataataatatttgtgaaatttgatgggagttaattttatcatagttttagaagaatagaataacaaatgtaagacaaatcgccattgttttttccccggcggaaaataaaagcagttaaccgaacaatactatttagaaatctgacaggaattaattttatcatattttttgaagtatgaaacaacaaatatcattgctttctaaaggtttgcatgccgatttattatcgtaaatctatactatattagcccgttaagagaattaattctaataggcttctgatctcgactttgtttgacacgaaatgttacagcaactatgagattaatgtaacttaatggttaacaggattgttttttttagtggatgataaaattgtacaggaaaaaagccgtgaagtacaatttgtcttacttttttatgagatatctttgtttgtgtaatgagaggagaatgtcatctaataaataaaagtatgagaaataaaatcgccggatctgctgttttttatattgcattactgaaatttctaacgtcaaatgctcaaattcattcagagaaacctgtttttcattattccgtaatggacgcgttacgcaatggtgcttatacaggagaatttactattgccgagttgagagaaaagggaaatttcggaatagggacttacaattatttagatggcgaaatgatcgtacttgaaggtatttgttatcgggtagatgcttccggagcagttagtattgctgaaaccagtcttcagacaccatttgcttctgtggcattctttaaatccgatgttgagtttgaactctccaacgtaaaaaacatcgaagaacttcagaatgaggtgataaaaagactaccgtcttctaataaactttatgccatacgtattgattgtacatttgagattattactgtaggcagtgccaaacgtcttggtgaaaatgaaactaccggattagccgagctaatgaaatcaagacctttgtactcaaaagaacatgtttctggaacaatggttggtttttacaatccgccttatttttcagcgattgatttgtctccgtttcattttcattttatttcaaaagaccgtacttatggcggacacgtgatgtctggtaaattgactgcagcagccataaaagtaagtcttgatcaaaaaccgggctgtgaggttattttgccacagcagaacagtgtcttcaacaaaccgtggacaaaagaaaacaatgttaaaagcgcttattaaaaagaccgcttattaaattttaaaaatcaaaaaacatgacaaaattaaaattagcaatttctgcaatgattttgctcggtactgctatggcagcacagcagacgaaagaaatccaacatctaaaatttgataatttgggatgggaacaattgggggataaattacatcgtaaatacgtgtatggggagcaagggatgctggcgttgtttaagatggataaaggggccaaagtaccactccatcaacatccaaatgagcaaacgacttatattacaaagggaagcgtaaaagtgaccatgcaaggtaaagagtacatagttaacaccggagaagtattgattattccgggcaatataccgcatgaatttgaatgtctggaagacggaacattagacattgatttttttgctcctccgcgcaaagactggattgagggaactgccagttatttcgggaattcaaacacaacagcagcagctctcgaagtagttgccgctatggatatacgcccgggtgacgttgctgtatcagccgagggtcgtgtttttgcaaccattcatccgttaggaagtcagaagatgcaattggtagaaattgtaaacggaaaagcgattccttacccatctgtagcttatcagaaatataacgcaaaagcaaccgatacaaaatttgatgcgatgttaggactaatctttgataaaaacaatcagttatgggttaccgatatgggactcgaattaggtaaatccagactttgggcctttgacatcagtaagaataaggtagttcaaaaaattgaattgcctcaaactgttgcgcctaaaggtacattcacgcaggatgttgccattgatgaaaaaaatggttttgcttacttagccgatattgccaacccaggtattattgttttgaatctgaaaacaaaaaaaacacgtcgatttagcggacatacttctttacaggcagaaaacaaagacatgattattgacgggaaagtgatctattttggcggaaaaccggcgcgtgtagctattgacccgattacactttcaaatgacagggaaacaatcttttttggagctatgaatggaacttcctggtatagtgtaccggctagattattcagagaaggaaaaagtgatgctgaaattaataaggcaataagaaaagcaggtaacaaaccttttagtgacggtgctttgacagatgaatatggaaatcattattttacgaatctgcaagaacactccataacaaaactggacatttcaggtaaattgactacggtcgtacaggatgctcaaaaaatgcaatggccggacaatgtttataaaggacctgatggttggatgtacatttcagtcaatcagctcaatagttcgccagcttttacaggtgcggacgatcagggaaaacctccttattatatttatcgtttcaaactgtaaatcaatcttttatattttgtatgataacaatagtgcttgtatccgattgattttaccgaatattatcattttataaccgattattacgtaagtgataacgcatttttaaaacgtgtcgtcaaatagtacgaatagacttacttttgaacaaacagtatcacccttttatagattctgttggtgttcgtaaagtaaaagttaatctttaataataagcaataaaaaaatagtcagtgtagtaatgctattttgcgttcttgtggcaaatgctcaagataaggaaaaaaaaagtgaaactagagtagggtaaacatggcttttggtataagtggagtcaaatacaagaatgcgaagtctaccacatttggaatgtttgaagtagcttaccgttacaacattaggggaaaatttaaggcaggaggtgatttgagttaccttagaaccgaagataaatttgaaaaaagcaaaacatttggggccttcgtggagttgggttttggatataaaggaattgctacggcagggcttaattataaattttaaagaaagatttaacaagtagactaactagaaccaattattaaaatttaaccatttttaagaggggagaaatctcctcttttttttgtcattacgctggatttttcacagcaactagctcactggaatacttataccaatgtgttaaattaataagattcttattcgaattaaatggtatttgaaaataaaggtattgatattcagggttatgtgttttttaacttagagtatattccacatttacactaaaagttatcaattattccacagttgatgcacttattgaaatcggcatttgagtcccataagaccaccctatatttgtactcagaaagcaagttttatcaactaacagctcctttaagaattaaacaacaggcaagccatgatgatttgtatatcataaactttgatcttagcgaagagttcaactggattcagattcgtgatattagttataaaataggttccttagcgaatttaggactctttgtttggaagaatagcatagaaaatatttatgaacatgcagccggaaagaggatatttacaatgcgtttaatcgtggatcagaagttacttcgtcctatctatattcataaactaaacgataaactagctttaaaaagcaacgataaatttgacagcaaagaactttgctttcacgatcttattgacagcaatagcagaatactgattgattcgataaagcataaggatgttttaaatcaattttcaagtttctatctcaaaggagtcgctttaaaattactgggaaactttattcagcggtattcagataccgttttaccttcatgcagaataaaaaaaacagacctgaccggcatagagatttctaaaaagtatttactgcaaaatttaaaaaataaattccccggaattggagagttgtcaaaagttgccaatatgtcgaccagtaaatacaaaagactctttaaagaaattgaaggtgtaacaccaaatgatttttttaagagagaaaaaattattttggcgcaccaattattgtgtagcggatcttatgattctattgttcggttggcctatgatcttaatttcaccagagcagattatttttcaaagaaatattttaaagtttttggaagaaatccttctaaagatttgattgaaaaaagcatataaatacttttaaaacacatgctgttttctaaaattaagttttaggaaacagcttttctaatttaaaccgggataactgtaaatctttagctgctaatataaatgtttatacaggcaggtttttctcaaatgctgatccaaatgaaaagaacgaatcggagcttcctacaccttcaatttgatggatttgctcgtacaaaattttgcggagctcttcattattaacggccacaatttttataaacaaggcatactttcccgaaacccaatggcactctacaacttccggaatttcttttaatttttcggcaatagaataggaaaatcgtgcttctttagtcacaattcctgtataggtagtggtttcaaaaccaatttctttaggatttaattttaccgaaaaaccggtaataattcccgattcctgtaattttctaactcttaaatgtaccaatgaattggatatgtttaattctttggcaagatctgaaaaagagattcttccattttcacttagtttatgtatgatttcacggtctaaatagtcagtattttcattcttcttgatacttggcatggttgggcgtagtttagagatttctattattttgacaattcttaagttaaaaatgattttataagtgtcaaaattacaaaaaaaaggatatgaaatgtcggattttaaataaacgtaaaagtaaggtgttataataacacttttatatataaatttgtgtgataatcacactattttaacaaaacggaaatggataaaaatcaattacttatgaaattatgggagcaatatgccaatattaccccatctgcaagaagaatacatgaattactggaagaaagaggagaagagataaaaaatgaccatatagcgattcgtacttttaatgataaacgtgtaaatattgaggttttggaaaaagctttcctgaatgttggttatgaagcaaaaggagaatataattttgagagcaaaaaactttttgccaaacattatgagcacgctactgataaggatgcaccaagaatttttatttcggagctggaattagaaaaatgttcctctgagttacaggacacggtacaaaatatcctgaacagttgtgatcagaacttatttaacgatcctgaattagttttaagcggatctgtatggaacgggaattcgcaggccatctataaatctttattagaggaatcggagtatgcagcctggatgtatgtttacggtttcagagcgaatcactttacgattagtaccaatgcattaaaaggatttaacaccttagaagaacttaatacttttctggaaaacagcggatggaaactgaatgcttccggtggaaaaatcaaaggaactccggagcaattattagagcaatccagtacacttgctgatttgtatgtagttgattttgaagagggtgtattagaaattccatcttgttattatgagtttgcccttcgttacccaatggcgaatggcgaattgtatcagggatttgtagcatcgtctgccgataaaatatttgaaagtacagatgtaaagctgcaggaggctaaataatcacaggaattaagtatagttatcgttatcataatcagttttatacaatttaaaactgaacaacctattttaaaaaagtcataatggcagtaacagaattacaattcggaataaaggaagctttaagccaattgggaataaaagaagttaatgagggaacttcaaccggattgaatcatttttcgggaggagaaattctggagagttattctccggttgacggacaattgatcgcaaaagtaaaaacatcaactgctgctgattatgaaaaagtgatggaggcagcaacagctgctttcaagcagttcagactgatgccggcaccacagcgtggagaaattgtacgtcagtttggggagaagttgcgtgtgcataaagaggcattaggaaaattggtttcttacgagatgggaaaatctttgcaggaaggttatggtgaagtgcaggaaatgattgatatctgcgattttgcagttggactttcccgtcagcttcacggattaacgatgcattcagaacgcccgggacatcgtatgtacgaacagtatcattctttgggggtagttggaattatttcggcttttaactttccggtggctgtttgggcgtggaatacagccctggcatggatttgtggagatgtttgcgtttggaaaccatcagagaaaacgcctatttgtgccatagcttgtcagaatattataagtgaggttatcaaagagaataatttaccggaaggtatttcaggtttgatcaatggggactataccattggagagttactgacaaaggatacacgtgttcctttaatttcggctacaggttcaacccgcatgggaaaaattgtagcgcaggtagttgcaggacgtttaggaaaatcattattggagctgggaggaaacaatgcgatcattgtaactccggatgctgatattaaaatgacggttattggtgctgtttttggagccgttggaactgcgggacaaaggtgtacgtcgacacgccgtttaattattcacgaaagtatattcgacaaagtaaaagatgcaatagtggctgcctacaagcaattacgcatcggaaatccgttggacgaaaagaatcatgttggtccgttgatcgatactcaggcagttgaaatgtatcagcaggcgctaagaaaagtggtagccgaaggaggaaaaattctggttgaaggcggtgtactttcaggttcgggatacgaaagcggctgttacgtaaaacctgctattgcagaggctgataattcatttgaaatcgtacaacacgagacttttgctccggttttatatttattaaaatactcagggactgtagagaatgcgatcggcattcaaaacggtgtagcacaaggcttatcctcagcaatcatgactaataatttaagagaagccgaattatttttatcggttaccggctctgactgcggtattgcgaatgttaacatcggtacttccggtgctgaaattggcggtgcttttggcggagaaaaggaaacaggcggtgggagagaatccggctccgatgcctggaaagtgtacatgcgcagacaaaccaataccattaattataccactagtctgccattggcacaaggaataaagtttgacttataaaataaacgaataccagcagtttttctaaaagtcaaattaaagagaataccgcactttataaggcagttttgtaatcgaatgtcttataaagtgcttgcctacaaataaaaaaactaaaaaaagcgaaattttaattaaccaaaaccattaccaaaatgaaaaaactactcattaggaagttctattttcttcctttattgttatgcttgtggttgccaaacatcaattttgcgcaagcaaatcaagcacaaaagaccatttccggaaaagttactgatgataagaacaatacgctgccgggtgtgagtatttctattaaagactctaaatacaatgcagcaacagatattgacggaaattatactttggtgtattcatcaagtcttgtgaatccggttatcgttttctcttatatgggatttatagagaaaagtgaggctgtaaacaatcgtggtgaacttaatattaccatgcaggaagaaaccaataaactgaatgaagtagtcgttattggttatggttctcagaagaaaagcaacgttacgggagctatttctactgttaaaaaagaaagtttagaaaccagagcgacaacaagcccttctgaggcacttcagggcttagttgcgggagtaaacgtgcagaaaagcggaggtgtagcaggtgcttcggtaagcgtaaaaatccgtggggtaaatacctttggagctacagaaccactttatattattgacggattccagggagatattaatacgataaatccaaccaatatcgaatcgatggaggtattgaaagatggtgctgcggctgcaatttacggatctgttgctgcaaatggtgtgattatcgtaaccactaaaaatggacaaaaagaaggcgtaaaaatagatttcagctcttttttaagtatcaccaatccgtcgaaaacattagatttattggatgctgacgggtatcgtacggttcataaaagaatgtacgatgagtacaataagtatgcgacttcaccaaaagcacttccggcttatatcacggctccatctgatgttaatacagactggcaggatgaagttttccgttccggatttacacaaaactacggtttaggagttcaaggaagacaaggtgattttaaatttgctttatacggaaactttgtaaagcaaaaaggaattattatcgacaatcaatttggttctcaaacaggaagtgcaagggtaagtttcaaaaaatctatttttgatattgatggaaaaatggcttatatcggaacccaaaatgcattgcctaactttcagttgaaagaagtttatacaatgtctccgttagttccggtttatgatgataatgagcaatacggttatggattgactaataagaatggtttgccggccggaacgaacccggttgccgaagagcattttagaaaaagtaataatgtagggcaggatattacagctaatattgctgcaacggctaatattgcaccttggttcaaatataaattggcctattcttatcgtgtgaaaaacaaccagcaaaccgctcattttcctccatttattgctaatccaaaagaggtacatctttatcccttgcaatcggagttgagaacaacctggagtgagcagatattagataacattattactatcgataaaactttcggaaaacatgtttttggtttaatgctgggtaatacttttaacagtcaggcatccaactggaatcaggtaagtgttgaaggaaaaacaactgattatactgtagaaaatggacagttggtttctatcgaccgtccgtcaggatttcttgatcctggttttgaaactatcggagccggaagaggagggacttacactgcagacggttcaaagtttcaatacaatcgtgtttctttcttcggaaggttaaactattcgtataatgatcgttatttattgcaaatgaccgttagaagagacggttcttctaagtttggtgcagacagccgttggggaactttcccgtctatcgccttaggatggaaaatcgagcaggaagattttttcccgaaagatatttttatctctactttaaaactacgtgcgagctggggacaattgggtaacgaagctgctttaggatactattctgctaatactttaattaacacaggaaattctttaggttcaggttatgtacagggagttggaagtaatccctggccgggaagtattgcgctagcattagaaaatagaaatttacagtgggaaactacagattctaaaaacattggtattgattatactcttttgaaaggaaaaatcagcggttcgatgaactactatcacaatgtgacggacaatttattaattacaaaaaaactggctccatccgccggagttgatgatccaatcttgaacgtagggaagattagcaacagcggttttgaatttgaagtaaattaccgtgatcaggttgatgaatttaaatacaatgcaggtttaaattttacaactcttaaaaataaagtagtagccttagcaaatgagggacaaactatttatggagaaggattaaaattcaatgccgaacattttccaactcaggcacgtgtaggaagtccaatcagtggattctatttgtacaaaacagatggcatttttcaatcagttgaggaggtaaatgctcataataaaaacggtgttttattacagccaaatgcaaagccgggtgatattcgttttaaagatataaacggagacggagttattgacgacaacgataaagcttattcaggaacaggattgccaaaagtagaagtgaaccttactttgggagccagctacaaaggatttgatttttcagcattgattggaagtggctgggggaataaattgtacaacggaaaccgttatttttacgagtctatgagttcaggaactaacatgttagcttcaacattaaattcatggacaccggataaccgtagtgatattccaagagcagtattacaggaccctaacggaaacagtcgtgagtcagatcgttttctggaaagtggaaattttataagaatgcgtcaattgcagtttggatatacgataccaagcaaaatgttaggcaaagcaaaaatagacaagcttagaatttatatcagtgcagagaatttatttacgatcaccaattattcaggtattgatcctgagttttcacgtagttctgtacttaatactggtattgatcgttttgtgtatccatttacaagatcgtttgtatcgggtattcagtatatattttaattctattttataaaagacatcatcatgaaaaagatatttttattattttccactataggtttgctgactataacaagctgtagtgattatctggagcagcaatctccggaccaattgacctcagagaatttctggagaaataaagccgatgccgaatctgctttggcggcaacttacggacagcttgaatgtgctactaacgaatggtcttttgccgaagtaaaatggccggtagaagcctatcgtgaagacatcaacgaattgggaagcgatgctttgaactaccaaaactgggtggaactttcaacttttacttatacgaacgggaatagtcagttcaccagttattggaaaattaattacagaggaatcagtaatgccaatcaggtgattgataaattaccaaaggttccggcttctgccataacagatgctgaccgtaaacaaattgaggcagaagctcgtttcttacgtgcttattaccacatgaaattgcttttgaactgggataaaatttatgttagagataaatacgtaaccaaagaaagcgatttaaatgttccgttatcgacaagatcggaggcctgggattttgttacaaaagaatttaaagcagtagcagacatactccccgcaaaacaaactttggataaaacaggacgcgcaacaagcggagcagccaacagctaccttggatttgcatatttaaccagagcttatgaggaaacagctcaaaagcaagcttttttaaacgaagcgcttactgcattgaataaagttcaggggtatgagctggttaaagattatgtttctatgtttgacggtaccgtaaaaaacagtaaagagtctatttttgaattgcaattttctgaaactaccgcaaatggtgctttctaccgtaatgctcttcactattggatggcagcaggagaattgggcggatgggacgaaattttgccaagccctatgttggtaaacgaattcaaaaaagaaggaaaaattgcgacgacaggaaattatgatacgcgtttgtacagtactattttctttaaagatccttattttaatgatgtcaataatcctttggtattaggcactacttatgatgaaaagtttgaagggaaagacaaaccggtatatcgcagatacattccaaatactcaggacaaaatgaatcaggagtttacggcaatcaacattcctttgatgcgatatgcgaatgtactgttgatgcaggctgaggcactgaatgagttaggacgtaccggagaagctattccgtatatcaataaagttcgtgaaagagctgatatgccagcgatgaccggaacaactgcaaccgctgttaaagctcagattgaacacgaaagaatcatagagttcccgttagaaaactaccgtttttatgatttacgtcgttggggaaaaacgaaagcagcacttgatgcagtaggacgcagcggttttgatgcagcaaaaaacaatttttacccaattccattaacggaattacagacaaattaattctttagcagaaagagttgaattcctaaaaaatgttttcaataaagattttaatcctgcaagatctttttcagatcttgtaggtttaatttttatagctacaagcctcacatattaaaaggattagattaaaagattaaagaaaatctgcaaaatctgcgagaaaacattcagcacaaagcaactaagcaagtgttgaaataaagccacagattaaaggattaaaagattaaagaaaatctgcaaaatctgcgagaaaacattcagcacaaagcaactaagcatttgccgaaataaagccacagattaaaggattagagagattaaagaaaatctgcttaatctccaaaatctgcgagagtatattaaacataaagattaaaaaggtactgaaataaagccacagattaaaggattaaaaaaatccacaaaatctaccgcaaagtacttaagttaatgaaagatttactacattatctaactaaaaaacacaccacaaaaacaaaataacatgaacaaaaaggaaatactttttattcttgcatccttttttatagtacaatccggttggacacaaaaaagctatccaaacttagaatcggctaaaaacagtctgaactataaaggaaacccaacaaatgcaacagatcgaaaatcactggcgttttcagataaaggggcctggtttgggtttggatttttagaaccatccgtagtgcaggccggattttcaggaccttttttaatgacagaacaaaatggtgtctggttaagtccttcgtttgtttctttagagcttacggatgaaaacaaaaaagatgccattcaatggaaaaatacgctggtgaaccaatgcagctataacagccatttggaacaggagtttaaaaacgaaaagttaacggtaaaacagcagttggtttatttatccggtcattcggctttacaaaaaacaagcattacgaacacatcaggaaaaacaataaccctttttccgtcctatcattcaacactttttttaaatgatttgaagctttcaaaagaagataaaactttaaaaattgtttcttctaaaagcacagcaacggggtacattcagtttttgaatagcactcctgaaattgaaattacgaatcagggctataaaactcagacagagaaactggttctaaaaccaaatgaaactaaagaaatagtggtttctcaaaccttcattttttctcagtattcctggaaaacggaaaatgaaagcattgctaaaacggcattcaataccctgctaaacaacacacaaaaagaaaaagaaaagcaactggtgcaattaattgccagaaagaaaaatatttacaaagaggccgtttactctaatttgattgctaaactgctattgactttacaaaacaatacccgaattgctgccgagggtttgaaacatggcggacttttcccaagctataattacgaatggtttcatggtttctgggcgtgggacagttggaaacaagctgttgcagttgccaattataattcagaactggcaaaagatcagatgcgtgctttgtttgattatcaggagccaaacgggtttattccggattgtatttacagaaataatcttctcgaagaaaacaattaccgaaacactaaagcgccgcttgcagcctgggccatctggaagatttatgaaaaatcaaaagacgttactttcataaaagagttttatccaaagttgaaattatatcacaattggtggtacaaagaccgcgatcacgatcaggatggtttgtgtgaatttggttctacagatggaactgtgattgctgccaaatgggaaagcggaatggacaatgcggttcgttttgacgacagtaagattttgaaaaacggtgagaaagccttttcgttagatcaggaaagtgtagatttaaattcctttttatatgccgagaaaaattatttgcagaagatggcagaagttttaaaactaactgaagaatcgaaaaaatggaaggaagaaagtactgctttgaaagttaaaattcaaaatcagttttgggacgctgctacaggttggttttacgacacgactatcgatggtaaaaccttgataaaagcaatgggctgtgaaggatatttgcctgtttgggcagaggtcgctaccgctgagcaagctcagttagccaaacaaaacatgtttgatacggccagtctgaacacatttgttcctttaccgacactggcagccaatcatccaaagttcaaaccggacaatgggtattggagaggaccggtctggcttgatcaaagttattttggtataaacggactggaaaagtatggctatgtgaaagaagcaaacgaactggctcataaattaatttacaatgccgaaggagttttggacaaaggaacttctatcagagaaaattatcaacctattacaggaaaaggattggaagcgtacaactttagctggtcggcttctcattatttaatgctgcttttagaagataagtagtaaaaataatttgtagtaaacacatagggacatagattatatacgctcaagaaagacgtttcacttcgcattaatactcaaagctatgtgtgaagaaatgtgtttcttattgtattctctttttttaagaataaaatctatgtccctatctgtttaattaaacttttataaaattgcgacagcgagttgagaataactatctaaatttgactaaaacaacaacagtacaaagtatgttcaaccagaaaatagcattcacaaaaatagtagcaacaggcctgctaattgcaaattgccattcggcacctgtttttgctcaaacaaaaaaaactacagcgacagaaaagaaagatccacagcgttttttctcaaagcctgatttaatgcagatcggtgtttattattatccggagcaatggccaagggagcaatgggaacgcgatttaaaaaacatcaaaaaactgggatttgagtttacacattttgccgaatttgcctggacgtatatggaaccggaagaaggcaagtatgactttaaatggctcgatgacgctttggcaatcgccgaaaaagaaggtttaaaagtgattttttgcacgccaacaccaactccgccggcatggatgggggaaaagtaccctgaaatttatctcgtagatgcgagcggacgtcgcagagagcatggaaacagagccaatcaatcagtttcaaatgaaaagtacagagcatttgtcgaaaagatagtgactgaacttggaaaaagatacggaaagaataaaaatattatgggctggcaagtggataacgagccgggagctccggatgattttagcccatctgcgcaaaaaggatttcaaaaatggttaaaggcaaaatacggtacaatcgaaaaattgaatgccgagtggctgggcagtttttggagtattcgctataacaacttcgaacagattgccattccaaatgctgagatttattttgaagacaaattgagtccgcatgctatattagatttcaaaagattcacggcagattcacaagccgaatatttgaatttacaagcagaaacacttcgaaaatatgttgatccaaaacaatggattacgaccaattatacgaatgtagtttatggtgcagacccaagaagaaccgataagatggattttgccacttacactatgtatccggtgagcgggagaaatcaattaggtggtcagaattttagaatgggacatccgaataaaatatcggaagccaatgattattacagatcgatcaatggggtgactggggttatggaaatgcagccgggacaagtgaactgggcgagtattaatccacaattacttccgggaactgttcatatgtggatctcacaagcttttggaggaggctgttctttcacctgcacctatcgatacagacacccactagggagcagtgaaatgtaccatgacggaattgtaggtaccgatggtgtaaccttgactacaggaggaaaagagtttgtacagtcgatcgaagatatgaaactgcttcgaaaagagtacaatccgaaagcggtacttccggctgatcttgccaaaagaaaaacaggatttttatggagtcatgagaatctgtgggatttggagaaccaaaaacaaacagagttctggagtacgtggagacatcgaaatacttatacttcagcagtaaaatcgactggtgcaccaatggattttattacagaagaagatgatttttcggcctatccgtttattgtagcaccggcttatcagctgatcgatcagaaattggttgacaaatggacgaaatatgtagaaaatggtggtaacctgattttgtcatgccgtaccggtcagaaagataaaaacgggcatttctttgaggccaaatggagtgcgccaatcgttccgttaattggtgctgatgttgacttttttgacatgcttgtggcggatgtaaatggaacgataagttccggaaacaatacttataaatggaatacctgggcagatgttttaagtccgaaaccgggaacagaagttttagcaacgtatgccgatcagttttataagggaaaagcggcagcaattaccagaaaactaggaaaaggaacggttacttttataggagcagaaagtaaagacggcgacttggaaagacaagtagtgagatcggtttacgaacgttctaaagttactatcgaagatttgccaaaaggtgtatatttagaatggagagacgggttttatacaggagtaaattataccaatgagcctatacagttagcaattcctgagggaagcaaaattttggtaggacaaaatcctttacaaccggctcaggcgattatttggaaataaaatttagacacgaatttcacgaatgagcacgaattttttaagtggcatgcgtacaatagttcgtgaattacttcgtccgttcgctatcgctcgggtcgtggcgaaaaaggtttgtcagattgggtaaacaaacaaaaaataattcgcgttaatttgtgaatttcgcggcaaaaaaataagaaacaattttaatatagtatcaatgattttttcagaagcaactattcaggatttagtaaaagaacattacggattaaacgttaccgtaaaagcattaaatggatatgatgaactgaactttcttttatcgaatgagaagaatgaaaagtacattctaaaagtatcaaacgaaagtcacccttttccttttttagaagcgcagatcaatatcattcagcatctaaaaaagagccctgtttcaaattgttttcagcatttcagtatcaataaacatggagaagaactgactaaaattgttagtaattctcaaacctactatatcagaatactgaactttttggaaggtgttttttgggtggatgaaaaagctaaaacaaaagaattacaatatgatctgggaagctttttaggaaagatggatcatgctctgcaagatttctcacatcctgccatgcaccgcaattatacttgggacatcagtcgtgcgagtgaagcagcggacaatttaaaatacattctaaatcacgaaaaaagacgtatttccggctatttcctgttgcagtttgataccgaagtcttgcctcaattgcatcgcttgcgtcatgcttatgtgcataacgatgccaatgattataatgtactggtacaggacaatcgtgtcagcggtttaatcgattttggtgatatggtgtatactgctttaatcaacaacttagcgatagcctgtacgtatgccatgctggatgaagaagatccggtggccgttgcagcattaatcgttgaaggataccataaatcgtatgctttaaccgagcaggaattggatgtattgtattatctgattgccggaagactttgtatcagtgtaacacaatcggcttacaatgcttcattagacagcaacaacgaacatcattttataaccgaaaaaccggcgtggaatttattgtttaaactgattcagattaatccaatcaaagcacaggatgcttttagaaaagcctgtggttttgaaggagtaattactgcggatgattacagtgatttattggaagttcgaaaaaagaaaataggacgtaatttaagcattggttatcaggacaaattgaaaattgtgaagggtgctttgcaatatttgtatgatgataaaggacgaacctttgtagattgtgtcaataatccttcgcatgtgggacattgtcatccggtcgtggttcgaaaaatgcagaaacagattgccactttaaatacgaatacccgctatttaaatgatgcgattacggcctatgccgagaaactgacagcaacattaccttcaaaactgagcgtttgttactttgtgaactcgggtagtgaggccaatgatctggcgattcgaatgagccgtcattttaccaaacaaaaagatattattgtattggatcatgcttatcacggaacttctaccgttgcgatggaaatgagtccgtataaatttgacagtaaaggtggatttggccaaatgccttggatacacaaggcgattaatcctgatttgtatcgcggcccttataaatatggtgataccaatgcgggagaaaaatatgctgccgatgtacaaagaattatagaggacttgaaagaagaggataaagctcctgcggtattcatctgtgaaactttattgggagtaggaggtcagattccgctaccggaaaattatttaaaaacagcgtatgattatgtcagagccgccggtggggtttgtattgccgacgaagttcaggttggatttggacgaatcggagaccacttttggggcttcgaattacaaaatgtagttccggatatcgtggtattaggaaaaccaattggtaacggacaccctcttgctgcggtgattgtaacagaagaaattgcggatgcctttaataacggaatggagtattttaacacctttggcggtaatcccgtatcgatgactacaggattggctgtattggatgtgattcaggaggaagaaatgcagcagcatgctctggaaacgggtaatcatttaatggatggtcttagaaagttaatggcaaaatatccaattattagtgatgttcgcggacatggtctgtttattggtgccgaaatggtaaaagacagatcaaccatggaacctgctgtttctgaaatagattttgtagtagaaaaaatgaaagcccatggctatttattgagcacagacggtcctttgcacaatgttttgaaaataaaacctcctatgacattcagcaaacaaaacgctgatgaaatggtgcgattattagatattgctttgagcgaattgtaggtacctaataacacacaatattgtcatttcgaggaacgagaaatcttcacgtcaatattctgcaaagattgaaatactttgtcgactttcttgcgaagatttctcgttcctcgaaatgacaaactgcaattaataaaagaataaaaatgaataacaataatgtcttttccgatagttctgttcctttagaacagttggaaaaacaattagaaggtaaattattctacgatcataccatgcgcttgctttatgccactgatgcgagtgcctataaagaaatgccgctcgcagttgccgttccaaaaacaaaagaagatattcagaagattattgcttttgcgagagagcataaaagcagtgtaattccgcgcgctgccggaacatcattggcgggacaggttgtggggaacggaatcatagtagatatttcacaggagtttaccaaaattatatcggtcgatgaaatcgctaaaacggcatgggttgagcccggagttatacgtgatgaactgaacctccatttgaaaccttataagttgtttttcgggcctgaaacttcgaccagcaatcgctgtatgattggcggaatggtgggcaacaatgcctgcggtgcgagatcggttatttatgggtcgacccgcgaacacgtgcttgaaatcaaaggctttttggccgatggccacgaagtcacatttggctcgttaaccaacgctgaatttgaagataagtgcaacggaattaacgtcgtaagtccattggaacaagccatttatgctcaggtcaaagaaatactatcgtcagcatcaaaccaaattttgtttgaagatcattttcctaaaaaatcaattcccagaagaaataccggttatgctttagatttactggccgatacaatgccttttaaagattcagaagagcaattcaacttctgtaaattaatagcaggatcagaaggaactttgttcttttcgactgctataaaattaaatttggtcgacgcgttaaaaccttattctgcattggtgtgcattcattttgaaagtattaatgaatcacttaaagccaatattgaggctttaaaatttcaaccggacagtgtggagttaatcgatcactatattctggaatgtacaaaagaaaatattgaacaaagtaagaatcgtttttttgtaaaaggcgatcctcaggcgattttagccgttgaatttttaagagattctcctgaagaaattgacaccattgccaaagaaatggaagctttgctgcgttctaaaaatttagggtatcatttcccaattgtttatggtgaagataccaataaagtctgggctttgcgcaaagctggattgggcttgctgtctaatattcccggtgatgccaaagcggttgccgtaattgaagatacagcggtagatgtaaacgatttacccgattttatcgaagattttaatgctattctaaaaaaacgaaatctaaactgtgtacactatgcgcatgcagcaacaggagaattgcatcttcgtcctattattgatttaaaaaccgaagaagggacggtgctttttagaactattgcaacagacattgcgcatttggttaaaaaatacaaaggctctttaagcggtgaacatggagatggaaggttaagaggtgagtttattccattaatgttaggcgaggaaatctatcaattgtttgttcagattaaggaagtttgggacccgtggggtattttcaatcccggcaaaattgtgaacacaccaccgatggatacaaacttaaggtacactgccggacaggataccccgatgccagaaacttattttgatttttcggaacacaatggaattttgcgtgctgccgagatgtgtaacggatccggagattgccgaaaaaccgaaaaaagtgggggtaccatgtgtccgagttatatggccacacgtgatgagaaacataccacacgcgccagagcaaacatgctgagagagacgataaccaactcaacaaaagctaataaatttgacgatgacaatcttgttgccgtattggatttgtgtttgagctgtaaaggctgtaaatcagaatgtccttcgaatgtggatatggccaaattaaaagctgaaactttacaacactatcatgataaaaatggagtgaaatttcgttccagacttatcggaaatactcctaaaataaacagctggtttgctgcgattccttggatctataatttatctacaaaaggggcttttgggaatgtggttaagaaaacaacaggttttgctacagcacgaaaattacccttgatgcataaaattacttttgccaagtggatgaagacgtatcgtcaaaagggtaattttagcaatggtaaagtatacctgtacaatgatgaatttttaaattattatgatgtcgaaatagggcagaccgcggtacaattactgaatcgtttggggtatcaggtcgaaattccaaaaatagggattagcggcaggacgtacctttcgaaaggaatgctaaaagaagcacgtgaaattgcagaacaaaatattaaggattttgagcaggcgattccacaggatggtattctgattggaattgaaccctcggcgatcttaacttttcgggacgaatatcccgatttatgccgaggagaattaaaagtgaaagcaaaaaaaactgctgcaaaagcttttctgatcgaggaatttttggcaaaatcgctggaagaaggcagaatttcttcaagtaattttaccgataggcaggaacgtatacgcatgcacggacattgttttcaaaaagccttatcgtcattggtgccccttaaaaaaatactggctttacctgaaaattataccgttttgaacattccgagtggttgctgtggtatggctgggtcttttggctatgaaaaagaacattatgagttgtcgatgcaaattggcgagttggttttgtttccaaccattcgttctgaagaagaagccactttaatctctgcttccggaaccagctgcagacatcagattgctgatggtacgggtagaaaagcacaacatccggttgagatcttgtacaaagcgttaaaataggtcgtagcggcttgatttttagtttttaaataattcgaaaacgtagaaacataggttttgtaactggaattaaggtatttaactttcaaaaaaacaaaaagtatagtagaatagtttgtaacgaatgatttttttcatctccgctaatcaggactgtggcaacttgttaatcaattgtttatagtttgttgataaataatagcttatgtttgtttttttaacaagcattcaaaagaataatatttaaatttgagtagaggttaaaggtttgtcattttaaaacatctattatggaaaaagctataaaactaaaagttcgcaaggaattagatggtcgccaacagttgaacattataaaacttaaaggaagtttaatttctaaagggtatacagaaatcatacatattctggatcaggatgatgaatttcatattaactcttttgaaacacgatctgaaagtactaacgaagttcaggagtttattacagcttttatacacagagaaaacttaaccgatacaatctcgttttacaaataatacttttgcagtaaacgataaataatgcataaaaaacaagaaccccgtttctataccgaaacgggattctttgttttaaaatagtttgtccaaagtcaaagtttcaagtttcaagttgaaacctaaaatctaaaacctgaaacttgaaacctgaaacagaatgtttatcacatcccacctcctaaagctttgtaaagtaagatctgtgcatttgcatttttcaactgaatatctacaaaatcaagttcggcctgcaatttgtttttttgcgcattgatgatttcaaggtaattggcgtaaccactcagatacaaatcattggaaacatttacagcaatttcaagatgttcaatctctttagatttatatttcagcacattttcaaaagcttcagttcggtgcagtaaagcacttagttcattataagcggttgtaatggtgttttgatattgaagaaaagaaatttcctgtcttcggttggcagtaaaaaattcctgtttgatttgtcctttattgaaaatcggagcagtgattccgcctaatagttgccaggcaaacgaaccgctgtcaaaaaaagtactcaaagaaaaagagttcattcctacgtatccacctaaatttagagtgggaaagaaggctgcacgagccgctttagcatctgcatttgtagccctcaattcaaagtaagcttctgatacatcgggtcttttgtgtatgatagagtctacacttattttttgatttaagactttaagataacccgatgaaaaatcagtgtttctttcgatttttccgccgtattctccaagcagcgtaagtagtgccttttctgcctgattgattttaagatttaattgttctgcctcagccagtatattgttgttttgcgcattgaattgctgtacggcaagttctgttgcttttccaacagatcgctgtgccgaaacggtatgcagtgcctgctgttgtgtgtcaaggtttcgcttgtagattagtgcttgtttgtctaaggctactaattcgtagtacagctctgcaatatcgcctaacaatttagtcttcagcaatcgcattccttgttgagaggcaaaatatcggtcacgtgccgctttcttcctattgcttagttttccccatatatcagcttcccaggatacttttcctcccaggaaaaagttaggagtagtagccgttgcaattcgttgtttgtcggatatgttttgagacaaattagtatcaaagtttccaacaccctccatagtatatttaccataacgggttcctgaagcatcggcctgaaaatccaatgaaggcaataaagccagtttagctgctttcagatgcgagttggctattaagatacgctgttccatgattaaataatccggattctgagccatcgctttgtctaataattgttctaatttttgatccttaaaataagtggctgtttgcagcggaacaaaagttgttccgctgtcagtagctttttttgaagtaacatcgaaatttttaggcagtgctttagcagccagattatcattaacttttggagcagaacaagctgtgaataacagaattccggttaccaataagagtgaaaacgacttaaacttatagttttgatcagtaactgctttatattgatttagtgattttttcattattgtatttattttttcagtgctttttcaaatttggcaaacagtatataaagacccggtatgataacaagtccaaacaccgttccgatgaacattcctcccgcggcggctgtaccaatcgaacggttaccaacggctcccgcacccgaggcgatacataaaggaatcagccctgaaataaaagcaaaagaagtcattaaaataggtcggaaacgcagtcgggctccttcgatggcagcctccgtgatgtcccgtccaattttgttctgcgccatcgcaaattctacaatcagaatggcatttttggcgagcaacccgatcagcatgacgagtgctacctgagcataaatattattgtcgagtcccaccattaacagcgcgagatacgatccgaacactcccacaggtaaacttaaaagtaccggaaacggaagtagtaaactttcgtactgggcagcaagaagtaagtagacaaacagtatacataaagcaaaaatgtaaatcgtctgattccccgacaggatttcttcacgtgtcatacccgaccattccagttcaaacctgctcggaagtttttcggcagcgattttctccacagcggcaattgcctcaccggagctgtatccgtcagcaggttctccgttgatcatagccgacatgtacatgttgtatcgggttaaaacttcgggaccatacacacgttctaatttgatgaaagtagagaacggaaccatttcgccggcatcattcttaagatacatatccagaatactttcaggattcttcctaaactgaggactggcctgaaccattactttatacatttgtgagaaacgaataaaattagtcgcataaaaagaacccagcatcgtttgcagagtcgacatcgcattgtctaccgaaactccttttttggcagcctgatcgtaatcaatatgaatcaaatattgggggaaagtagcatcaaaactggtaaaagagttttgtatttcaggtgaagcattgagttccttgatgaaatttttggttacggcatcggtattagtaatcgttccacccgatttgtcgagtaagcgaagttcaaacccacttgtatttccaaaaccgggtaccgttggcggtgcaaaaatctcaatctgagcatcagaaatgttctttgttttctctcccagtttggtgatgaattcgtttaccgagatatcacgatcgttccagtcttttaaattgatcattcccattccgtaagaagctcctgcaatttcggttacaatactgtatccggcaagagtggtcacgttgtcgacacccttaatttctttggctaatcgggtaacctcatccagtactttttcagtacgttctaccgtggcgccctgaggtgtagtcacacttacataaaccattccttgatcttcagaaggaataaatccacctggaacaaatttactggttccccaggtaagcagacagaataaaaccaataatccggctgtaacggtagtacggtctgcaaatttggccagtattctgatataacctgccgttacattatcaaaccatttattaaaagcgtcgaagaaacgattcagtaaagaagtcttcttctcgtccggattatgcggtttaagcaatatagcacagagcgcaggagttaaagtaagtgcattgatacctgagatcacaatactaatcgccatggttaaagaaaactgtctgtagaaaactccaaccggaccgctaagaaaggcaacaggaataaacacagcactcattactatcgttatggcaataactgctcccgtaatttctttcatggcacttatggttgccggaagtggagccatatgttcttcggaaattttaacgtggacggcttcgacgactacaatggcgttgtcgaccacaattccgatcgatagtactaaagcaaacaaggttagcaggttgatcgaaaagcccatcatcgacatgaaagcaaatgatccaataagcgctacaggtacggctaaaaccggtattaaagtagaacgccagtcctgaaggaatataaaaaccacaaaggctaccaagataaaggcttcgacaagtgtttttaaaacctcatcgatcgatgcgtccagaaagcgcgatacatcgtaagcaatattgtaatccattccgggagggaaggaagtcttttgaagttcggccattttttcttttacgctggcaattacttcagaagcatttgaacccggacgctgttttagcatgatagaagcagacggtttaccatcggttttggaaaccattccgtaactcatcgatccaaattcgatcttagagatgtcttttaattttaggatggttccatctgaattggcacgaatcggaatttcttcatactgtttgggttcgtaaaatttccctccgtatttgatcacatattgaagctgattgtccaattgtccggagccttcacctacttttccgggtgcagcagagatgttttgtttttgaagagaagcaatgacctcatttgccgatatagcataagagagcattttttgaggatcaagccatacccgcatcgagtattctttttgtcccataatttcagcacgtccgacaccatctatacgtttcagttcctgtagaatgttgatatcggtgaagttaaagataaattgctcgtcctgagttttatccgtactcgtaatattcaggtacatcagcatactgttcacttctttctcggtcgttactccggcacgaattacctcttccggcaactcatcgagtatagtagtcacacggttttggacgtttacggctgccaaatcgggatcggttcccacttcaaaaaagacttgtatcagcgtcagaccgtcgtttgacgtaaccgttgacatataagtcatacccggaacaccattaatagcgcgctccaagggtagtgcgacggcattggccgaaacttcggcattggctcctgtatatttagccgttaccgttacagatggcggaacaatatcaggaaattgtgtaataggcaactgaaacaaggccagtataccaaggagtactatcataaccgaaatgattaacgatagtatttttcgtttgataaataactctatcattttatatttttttgatactaattaataaggaactataagcttgcgttttggatgttaattttgtcaccgtcccgcagtgattgagttccttcttgtacaatcaggtcgtcgctttttaatcctttgttgaggataaatacatcgtcaagcgtgcttccaatactaatgttggtcatttttacaattccttctttgttgacaagaaatacaaactgtttgtcctgaatcgaaaaaacagctttctgcggaattagaatcacattctttttaggttctgatataattagttttcccgatgttccgtgtttgataaaaccttgcggattatgaaattttgctttgtactgaatagaacctgtttgtcggtcaatttcaccgtcggcagttcttaattcgcctttttggttgtaaacgactccatttggtaattccagtttaatgtcgccacctgatttgttcagagttttgtcggtcatcatttgaaaatagatgttttcagggatcgaaaagtaagcgtagatatcatccagttgagaaaccgttgtcagcagggagccattttctacaagactgccttctttgaacgggatacgatcgatcgttccgtcaaaaggagccctgatagtggtgaaactaatctgctgattgattgcttttcgttcggcaagtgcatgggcaactttggcagaagcggcttcatacttggcttttgaaagttccagttctttgtcggcaattactttcttgttaaacagggtttgtgcctgctcaagctcgactgtagcaattctcagatctgccatggtacttttgtagacagcctgagcttttagtaattgtatttgcagctcgacatcactgattttaaagagcagttgccctttttgtaccttttgcccttcgctcacataaaccttatccagtaacccgggaatgcgaacgtgtatttctacattgtttttggcgtgcacatcagccacaaaccggttagaaacgatggtgtcctgcaaggtgactttgtagacgggcagtgtcttgattttcgaagtctcttttttggttttatctccacaagagctcagaaataaaacagataaaacaattaacaagaattgattttttgtagtgttcataatgaatttttaaataggggtatataaatgaaggtgctccccaacattgatttgcagggagtcgtgaataatttaaatgttaaataagggatattgtaacgactactgcttttagagagcagtaacgtttggatagaatttttttatatcacaagctgtcctttgcaataaaacacagaaagtgcattgcataagaggaatataaaaatgaaacggattatgacctagaataactggtacaggtgcagatgggtatgacgctgaatctggtagacagtggccataccataaattaagcgatttttgaaaattctgaatggtactaatttggtatagtacggtgtttttaaagtactgctgtctgaagttgtagcacggtgtttgatcttctttttgacaatgaaatgaatgtcaagatctttgggactaaccaaagcggaagacgaaaattgaggtacttctgaagcagtgaagttttcctgaagctgacaaatcgtaagttcagcagtatgtttaccagattctcctccacttaaaaaagggagtaagaacagcaaaataatacctatgaactttagtggtttcatgtatgcagtaaaaaattgtagcttgtcatctgtaaagacaacttctatttgatatgggccaaatataggcatttgcaaaataaaggattcttaaaattttaagaaaatattaaaaattgaggataggataacattccggaaagacaccattcatttttaggacggttttatagaggcttgatgttataaaaacagaattcattcttaattttgtaaaatgacaaagaagcattaaaattattgaaatgaataaagtattctcccaacagggcacatttttattaggaacagatcgatcagaacaatttgttttgagtacacctgttcagtttagcgagtatactgttttattcgttagtgaaggcgaggggatttttcatgctgattttgcctcttttcattttagaggcccggttcttttgttctcaacacctcaacaatctatttatataaaagaaattaaacctcttgtatatagtgttttacaatttcatggtgacttctattgcattgagtatcacaggaatgaagttgcttgtaacggtttacttttcaataatatatatttagaaccttctatactattaacggttgaacagcatcaattatacacacaattaatggatcagattacggatgaactaaagcaggaaactccatccgagattgtattgagagcttatattcagttgttcttagccaaatcgagcagtatcaaaatgaacagcatggagaagcaggaacttcaaaaagatgaaaaaatggatcagtttaggctgcttttggaggagtattttctaacccttcataaaccaagtgattatgcgtccttattagcgatgactcccaatagttttaccaaacaatgtagaaaacgcttccataaaactccaacgcaaatgattcaggaacgacaaattcttgaagctaagaaacacctgcacctgaccagaatgagtattaaagaaattgcttttgctttgaagtttcaggacgaatactattttagcagggtctttaaaaaaaggacaaacatttctccgcaaactttcagaaaaacaaccggaatctcgatcgtggcagatttgtctagttaatatcctttttcgtccattctttaccaaacctttgaacggtagttttgctgtgttatttaaaaacaaataatttaaaaactacagcaatgaaaaataccattttgaatacaattgcaaatttagatcagttgggaaaaaaagcagtacgtgccggaatcgtaattgtttttttatggattggcggacttaagttctttacctacgaagcagacggaattgtaccttttgtagccaacagcccttttatgtctttcttttacaatcagccctccgagtacaaagaatttgtcaataaggaaggggagctggttaccgaaaaccatgaatggcagatcgccaataatacgtacgggtttgccaatggtcttggaattttgttaatcggaataggaattctggtagcgattcatcaatgggcacctttggcaagtctgatcggaagtatattggtttttatactgactataggaacattatcttttttagtcacaacacccgaaagctgggtaccacatttaacggatgagcaatatggctttccttatttgtcaggcagaggacgtttggttctaaaagacattgtgattctgggagcttccttaattacgatgagcgaatcggccgcattgtatctcaagagaccgtcttaaaaagctaaatcacagtaataccagaaaagcctttagtgctcagggcagctaaaggcttttgcattttcaattattaaagctttaaaactattgcacggttacggcataacttagatttgaggttgcagtacctcttttaaatctcattctgttgtatgctccgacaggaactccggcaggaattttcagtacggctttataagaagaaagacttacaatttctaaaggataggtgacagcagtgttactggtattgtaaacttctactgccgtaagctcatttaataaaccgcctcgcacttcaagagtttctcctgaacgtttagtagttggaaaaccaaatctctctgttttgaaatagtcaggttctgttacttcaatcttaaatctgttttctacactggcattctgaagggtgtaagctccatttttaatgcgaagatcatataatcccagcggcatattttccggaagaaagtaatatactccatactcaagaaaaggcgctgtcgtttcaccattgcctaagtacacgatttctgctgtgtattctgttttttgatcggcagcagatacaaagtaaactctggtatctttaaggctcatccataaatcattgatgatcgccggatcgctcgtaccacgattggtcatttttgccataaaacctttggctagtggctcttcctgagtcgaggcccatgttcgtggttccttttgtctgaaatctatttttagggtgtatttttttgtagtacctgcttttgatgtaacggtataaacggtaccgtctttaaaagctacctctgcaccagatgctggagagatagtagcctcggtacccagaatgatttccggtttaaccgtttcgggaagtgttatgtggttgctccaggtaattactatattttcctcagtcagagcggcactaatcgcattgttttcagtatccttgatggtaaaagattcaatatgggtgtaacccggaactttaataacatcggccggaatagtatttaccttgtcgatatactccgtttcgcacgaaacacatgccaatgctataaaaagcagggtcatttgatataaaaagacaggattatgtattcttttagtcatgattgtgttgtctatgtaattattacttgattttatttattagttttgccacttattgaataagcgggctattattttttaaaatgcctgttttacaatgcttacggtaattttacagagccgtttgtggtcatgggggaatgatttagggaatagggtattttgcagtcgatcgccggtcagcatttgctgcagttacttttatctatttcgtgctcccatgttctttttttacgctgttgttaattattttacctgagtccagttatagtttacagtactgtttgaagatcccggagtaatactggttaccttaaccaggtaagcttctaatgctgatgcaggactagtaactgattgtgaatttgtaccagaattagttctccagattacaatagcttttgcaggagtcataacatgtgtaaggatgttgtaagagtagtatcctaagccataatttgctccggatatagttccgttgtatcctaacacattgtacggatctgcaggtgaagtacccacattaccagatgcgtttttaactacaatagcagagttccagctatcccagtcgtcgcaagtctgatttaagttaacagtacccacataccatttaccggcattacctaccggacggattgaccctccgtaaataccttcccattgaacgttaacacctccaattgcagccgcaacaggagtccagttcgtataggtagaagacggtgcagcagttctgtttaccgtaacagaggtagaagtaactgtacaaagagctaaagcagatttcttagttaaattggatccttgcgattgttcttttgctaccgcttgtgtttcggcattttgttcgtcagtactacaagatgtaaatgaaatagcagccactgctaaaattgatagaattatttttttcataatgatttatatttgatagattaattggcttctttcattaccctcgcagtgtaaacaggcattttttattttcttaaatttaattggtgatcctgaacggatatttcatggtagttgacagattgtaactttccatcattaaccagtaatcggtatccggttgaagaggtacagttgtattggcagcatctgcaaaaacatacatgacataaaaacttccaatatcaagaccttcattgtattgtttcatctgccattttttgttgccttgcgcgtctaccacaaatacttttgtcacctcataagacggcaggaagttttgcccttttaccgtaagcggactatcggtactaatcgagaaagtttctgttggacttgatacttcatttacgactaatttaggctgttgtatgacaacgttcactgtgtaaaccgcggttgttccgtctgctgcctttgtggtataggttaccggagttttactaaaaacaggtatcagttcttttgcggcaggagaaatagtggtatttgccggtaatgttatggcagcttcaagatattgatactcataataagaaggcaggtaaactgtaatggtctttttgagattatttacagcactatgaatggcctgagtggtgcccggattggttacacgaaaagatataattctcttagcatccagaccggtaactatttctgtaatgggtgcttcttttacatctgtccatctttcttcctcactgctgcatcctgttaacaaagtaagtagtgtaaaagctgaagaaaataaagttgtttttaatggggtaattttactattcatgtgaattaaattgattatcggatttcaaatttggtacttcccgctggtaccattacatattcaaaagtgtaatacatgtgtggagtgtctttaaaccaatctttagcgctgtatacatctttataaacagatatcattttgatttttgcgtaattaccgttagcggttttcaggataatcgttctggccggaattacagtcccgtttgcaatttttaacgattccccaagtgcataagccacatgtgctttctgcggattttttccatccgataccacttcgcctccaaaatcatacaagtaccatcctgttccgtttccaaatgagcccgcatcatcagtaccgataaggtcaattccggttttaaactgactgtctgcaggaatatcgacaacttcgttaaaaggtttggctacaattgtgattccaccaacacctcccgcaagagagccgttgttttgggagttacttccattgtttccggataaaaagctcgcgtaaagcccgccaaaagccagatcccatttgcgggtttttttataagatccttctacagctttattttcttcaagactgtagtaaagtgttgctgaaggagcagtaggatttgcatcagaagtactcccttgatagtttttgacctgtattactttatagaataaaccggttgaaggaatttcggttttcggatcggttgccttattttcgtctgctgagcaggctgtaaacaaaacagttaggagaaaaatgaccagtaaggttgcgggcatttttggggttagggttttgatttttgtcatgttgttaaattaattggtatttaaatttttacttccgtcctgctgtacaaagtatttgaaagtaaaatagggagcaggccagtttaaatcagttacagcagggggattgcctttgtaagcatttatgagttgtagttttgcatattttccattaggcagacgtaacgcgtaagtacgatccggaatagcctgcatgatatgactgctcaggctgtaataaaaccaacccgcagagctttcagaggaagaccatccgattttagtaacttcactgttgttaaaatcagtatctgaaggtgcctgattgacatttttataagcctctttcaatagtattaccgctgtgttttttgccggaccgccgtaaccgggattgtactggtattttgtgttgtttataaaaacctcactattgtaaggccctgtaaaagcaatgtcccagtcgtttgttttcatgaattgtaaagaatctgcttttgtatgcagccagatttgtttctgatcgctaaagcgaaaaagaaaagtatggaaacttcttttttccttgccctttgtgtcggtgctcatagaagctccggtatctccggcaagatctgaaactacggtgcttttaccatccgtcaaagcggctgttggattttcgtcagtgctgctgcacgaaagaaagttcatacttagaataagtagtagtaaaggccattttttgaatctattatttgttatcatgatgaaatatttaagggagattatagttttattgatctttaaaaaaacgatagcttatgccggcaagtattattcttccgggctgtccgggcattagtggatcggtgtagttgaaaatgttatcagctgtgattcgaatactgagatgctcttttaacagttgtttttcgatactggcattcgtaagccaataatccttcacaaaaatgtcgtatttgtcaatgaattgattgccgtttcgatctccgaaaggatacttacctctaaaattaaccctgatatttgcattaagtttccacggattataacgatagaaaatggaggtattggccatgtggcgggaacgattttcgataccccagtaatcagacggacggggtttatacgaattaccggttgcaggatcatgtatgttttggctataaggccatttacccgcactgatactgtctttaatactaagatctttagcaattaaatattgataaccggcacttatttcgaggttctttatcggactgagttttaaagcaatttcaaatcctttgttaacagctttcggcaggttttgatacgtataaataatttgattattgattcctgtagcgacctgaatgctattgatttgattggttattttatgataaaaaagatttccttctattttaaactttttggaaggttctaaaactaatcctgcattgtacgaagtacttttttcggcctgaagatttccggcagtttgattgagtacgtattgcctgatttcactaatctgaccgtcctcttttaactgctgtagtgtaggagcgagaaccgcattacctatcaccaggtaatttccgttaggattaaagaaaacgaggtaattggttttgaaatcaggagctttaaatcctgtcccaatgcctgttttaaaagtcagtttagacgtaataaagtattgcaatccaaaactgggattgagtcttcctccaaaattattagtatgatcgtaacggagtccgcccacagcttttactttctgaacaggagaccattcaccctgaacataagagaaaaaagtctgtagagaattgataccattgagtgacttatcgttcatattttccagacttccgccaatcccgccaacaagctggtacgaattgttattgctgtaggagaattgctgttctacgcggtgaagagtctgtttaaaaacatcctgactaacagcattattgctttgctgccaggccacactcatatcggcagtataatgggtgaggtagtatcgcgtaatacttcttaaattagtattaaaacggtgatcgaacgaaagagaaaggttaagatcctgctcgtcctgatgatctccggaaatgtgtccaagaccaaaatccttttgcataaaagaacgacgcaggccgtaacgaccgcttagatttaaataactgttaacaccggtttggtaacgcgatcttccctgtaagctataattgtcgtagggtggagaagtggttcccttaatgtattttgaattggtattaaaaccgtcggttcgataataatttgccgctaaattggcagttcccttattttgtgcaaatggagtttcaccttcaacagtggcatcaagaatgttcaatgaaccataacttacagaagtctgtagctgcggatcaactacgccgtgtcgggtaataatgttaatggtaccgcccaatgcttcactgccataaagactggaagacgctccttttatgatctcaatgcgttcaatgttagacacactgattcttgagagatcgaagttaccattgttgcgtcccaccataggctgaccgtcaataagtaccataatgtattcgctgccaaagccctgcatttgaacacctacagatcttgctccaccactaatattgttgacaatggcaattccggtttgctcttttaaaacctcatcaagtcttcggctacccattaattcaatggttttacgatcaataatggttacgggcattgcactatactgagcattgacaagactttcgggattactctttttggaacgaccttttacgcttacttcattcagatcaatacccggctccatagtaatgtgcaatggcttgatagcggagccattcaaaacaatctgtcggatgtaatctttaaatcccatagtggtgatcctgatgttgtaggttccattggatacaccgctaaatgaaaagtaccccgtacgatctgatagtactgacttacctgaagactctagtgtcacgagaacctttggaagcggatttccggcatgatagacaaaaccgctaaaatcggaactgttttgagcctgaacaaaacttatatacaaaacaagcaaacaagtaagtattattttttggacaggggcgttggtatttttgtttttcattcttagtgttatccattgtctaaagaaataagagcattatttaaccattattcttatttagactgtgtaaaaataataattaataatgtagtaatagtattttttttacagaatgggcggaaattaagtaggtaaaagattatcaatgtgaatttaaacttcagataaaaggttttagctaattgtttattagtcttttagatgtttaaagaatacgtaagttaagttctttttttaagaaaaatttaacagaataaaagaggtgaaaaagcacaaaatacagtggctcttttgggttatttaggtgccggttcttacaaaatcgtctcaaaacaagagaaaatagcttttgaaaattttaaatactatctgttttggattttaaatggtgttacaactgagctgttctgttgacaatagagttttaaaaaaaatctcatttcgaaatgaaatgagattagcgaggttgccattaggagaaaacgtctatatccattctcctgcaatattgtgatcgtttggtaaataagtaagatactgcaccatgcgtgggttctgacccttattaggtgtggcacaatgaggcaatgcactgttccagatgataaaatcacctgcttttccaagcacgggctccgatttcagggttttgatagcttcttctctgggattgacattcggatcaaggttgtttaaccaatcgtctattttattatgaaatccgggaacacaatgaaaagcaccatcttcaggtccgcagtcggtgaggtagagtagtccctgtatttcaaactgaatgggctgtcttaaactcatgtcccaatgaagcggacttcccaagaaggtaaaatctctggtttccggcgggttgaaacttactttatcgatcgttttataaatttgatctgtacggtacagttgttcgtacgctcttttaattttggccgaaaatcggtttcggtttaaagtctcatgatctgaaaaattaagcattagacctttttgatcttcgtgtctttcgtaccagctgtcttctttaaaaggatccatttgcagaaaatcccaaatggcacgttgcgtgtcttcacaatctttctccggaatagcattttttagaaccacataaccgttttcattccagaattccagatcttcctgcgagagaacatcagtggcaataccttcagattcataattgatgtttcgttttctgttgctgatccagattttaaaagtatcaaaatcaggtttttcaaaatacaaatactgtaaagtgtcttccataccaatacccaattggaacaaggctttaatttctgcattccaggtttcgtcatcagtttgaacggttgaaccgtccagctgtaaagtgcgtttccataacttttcaagaacagttagtgagtctgtcatttcggtagtttttattatttatgaatcaatactttcaaaagtaaggtatttaaagcggtctgctaaaagtaaaaatacgtgtttttgtctttagtttatggtttatggtttatagtttatggtttatagtttatggtttatagtttatggtttgcgctccgcatcttgcatctcacatcttgcatcttgcatctcacatcttgcatctcacatctttcatctcacatctcacacattatagctacactccgttaaagaacaaaatacggaaaatctaagatccgatttatttatcacttcacaaaatggaataaaacaggtgtatttacgtattaataattgcagttttttacttatacttgttggtggtttatgggataataaattgattataagcgactaattttttcacctcttttcatagttaagagttgaattttcaccttccaaggtcatccagtaaggagtatgctaaaaatcctttaaagagtaagcaaaactttaaattcagagataatggacatcagttttttttcctccactattgttcaggtcgctatttcactgatcataagctgggcgttatttgctttattgtgcagtatgattcttgaactaacggtacagataaaaagtgaaagaggccggtttttcagaagtaaaattattgaaaagctttttgatttttccaatcagatcaattggggattgttaatgtacaacaacagcaacatcagattattgacgaaatcggaaaaagcacctccaaccgaaattacttccaaaactttggcagaagtactggtggataccgttgctaatgctcaggcagctaaaatactgcttcaggacgatgaagtaaaccatgaaaagaagtacagcaatgacctgctgaataattttgagtttgcgattacttatttggggcaaagcgatttgattttgatgttgaagaacgccatgaacaaagccaaaattagagcttccggggcggcaaatggggcggcagaaaaggttctttatgaagaattgattaaagaagttacgatttggtttgatcagtttagtgaccgaaccagtgtatggtataaaaaactctccagaaagcgcttgttcattatcgggcttctggtgagctgtatcattaatattgacagtatcgttttgtttaagtattatgatactaatccaacggcaagaaccgccatgattgattattatacgaagaacaagatgcaattagaagtactcagcgcgaaatatggtacaccgggacaaggcacagcaactgatacagcagccctgaattcaaccaaaaaagatattaagggtttatccaaacaaatagatagtttaaaaaccaatttagatttgcctattgggtggaaaaaagcacaatgtgctgatgtgaaaagcagttcagaaaaagattgtttcaccttctcttgtattctgcttaaaatactggggatcattatttcagcctttgcggcaagtttaggagctccgttttggtttgatattctgaaaaaagcaacttctacagcgcaaacagtaattaaagaagtatagattatggaaaataattacaaaaatgctcatacgcacatattcaccatgaataatgcgccaaaaaactttctggaattgtatatgcctccatttttggctaaaggagttgataattttacgaacaccaaccttggggcatggctaattagacaattggcaagcagtaataaaggaatggccaaaagatatgctacctttcttcaaatcggtaaaagtaaatatcaaaccgatatttttgaagatttaatgtcccgataccctaacgaaacatttcagtttattacgctgtgtcaaaacttggaatatttaggtgttggcagatctgttagcggttttgaagggcaaatagaggaagtgattgatatcaaaagaaaataccctaccaatattctgccttttttcggacttgatccaagatggaaaagcagtggagatgaaattcagaaaacagtagagcgatatttcgaaactaaaattgaagtaggcggaacgtatgtatatccgtttcagggactaaaaatgtatccaagtaccggacattatgcctttgacacaaaacttagaaagacgatggaatgggctgccgacaatggtgttccgataatgacacacacctattatctgggtggaatttttaactatgataagaattacattatacgaaatttaaatcctgttgatccctataccggaaatgtgtacggagtacctaaatttattgaggagaaaggaggtttctttggaaatctctttaacggccaaacacggactagttgtagaagcagctgctcttattttctcgagccacattcgtatgagtctatgctgaataccattaaagaccttaaaatatgttttgcacattttggtggagtgaagcaaatacaagtaatacaaaagaataatacagagaacaaacaaatcaatccttacggggtgttaagaaagaactggttcagtcagatacaaaatctgatggttcagcatccaaacgtttacacagacatatcgtatgatgtcgccgaatgtcttctaaaagaaaataatgcgctttataaagtgttttttgatgaggctaataaaccctatggcaatcaaatattgttcggtaccgattatttcatgacggagaaagacagtttggaacaagttgcggtgcagggatttagaaattatgcttcagataagatacttaacagcggaaactctttatgggatcaaatggcaaagaataatattaatacttatttgaagagtaagtattatccttaatggttttaatcaatcgtactgtttaattaatatagtgagatgaaattttttaacctccagaatcaagtgattctggaggttttttttgcgataaaggctgaaagctcaaaagcacaagaaacgagcaacgtaatatgatctacgttaagtaggagtagtgccctgaaaggttaagagcaaagagaggatctgaaatcagccctttagaactgtaattcttataattgtatttttattcagaaggttttgtagcgtaaatgcttatttgatatgaatatggtaattttaattctcaaaaagggaagatagtaaatgaaataaatttcgaaaaagaattaagtgatttgagttatatcaaacaaaaacaggccatagccaaacatattttgatttctttaaatgcaacaattgaaaagcttaagaagaaaaaaatcagttatgattttgaaagcatgcaaaatgattttttagaaattctaacaaaatggaaattaagttaaactttataaaatccgatttgcgaaagtagatcggatttgcttcgtctattcgttgtccttttgatcgaagggagactcaggcgataatgaataggagaagcaaatcgcactcctatatctacaaccatccggactttaccaggcgtaatttcttgcttgattttgcctttcagtcgaaaggacaatacagagtcataaaatttaacaaacgaaaaaatgttaaaaacttgacaaaaaaaagcattgtagtcgtcttataattcttatttttattacttataaataagagattcatgacattacctttcatagaaataatagaagccactaccagtgatcctaatttgctaatgtggaaatttgctgatgaagacaaagaaatcaaaaacggcgcaaaactaaccgtccgagaaagtcaacaggtcatgcttttaaatgaaggtcagcttgcggatgtttatttacccggacttcacactttgtctacagaaaacattcctgtcctaagcaaactcaaaggctggaaatacggatttgaaagtccgtttaaagtcgatgtttactttttcaatacgcatcagtttatcaataacaaatggggaactcttgccccaattctcctaaacgatcctcaatttggacaaatcaggatacgggcttttggaagttttgatattaaaattacagatgttgccaaattctttcgccaatatgccggaacttacaagcagcttaccattttcgaactgcaaaatcaattaagagattttgtcgctccaaaatttggtgaagttttagcaaacgaaaacataactgttacggatgttgccggaaacataacgcaattgggcaaaaaaatagagccttatctcaaaccctatttcgagcaatttggaattgagctgactcagttcgttattaccagcgtaaccttaccggaagaagtaacagcacattacgacaaaatcaccagcatgaatatggtaaccgatatggataaatttaccaaattcaataccgcaactgccatcggcgataagggaacagcacttcacgaggcaacgcaaaatgctttaagcatggggattcttttaaatcaactacagcagaataaagagacttcaaaagaagaaataaaagacgatctcacctcaaaacttcaaaaactaaaatctttgtttgatgccggtttaattgatgaagaggaatttaaatcgaagaaaacagaattactaagtcagttataatggaagagaaaaaagtaaattcatttttgagcaggctcaaagaaaaggcacaaaaacaaacgaattatggcggagaaacagaaatgactgaagccaagatgaatgctaaagactgtccaaattgtggcgcaggaagagccaaacaagacggactaacgcattgtgcctactgcggatttgagtttttgagtgtaaatctcacagatggcgtttaccttaaaaaagaagacaattcaatttaaacctttaaagtaatgttcggattatttaataaacaaaaagacgaagctcttccggaatggtattcggagcttcagcaatcacaggaaagatggtttaactttttagaaaaactggaagccaaactggaagaatttgcaactgccgcaattccggaattgaaagagattcttcaaagtgatgatgatttatacaaaagagcttttcacagagtatattccggtgtaaatggtcaattatccaatatcagagaaaaagcgagagatacttatgaagaaaaaattatcgacgtttacaatcattacaattcccagatttctgttttaagcaaacatcacaatttagtatcagatttcagaagcgtctgttctgatcgtcataatgactttgaagatcaatacgaatattggagaacccaaatcgaaaaaacacaggagcgtgatcttgaaattgagtaccaaaaaatactggacgaatttgaagcaatcaaaaataaattcaactgcacacaatgtggaggcaatattgagatcgaaaaaatctttttaatcgaaacttatattcagtgtccgtattgcaatacccaaaacacgtttgctcccagcacacaggccagaaatctgcaaaatattgccagaggtctggcagagcaaagaacagcacatctgtacaaagcttttgaaatcgaaaataacaaagagcgtgaattataccatcagcgtcatgaattgagtttgagtaaaattcacgaatctgataaaaaagtactgagtcagattctggcaaaaatggaggaacttgaagaacaaagacagtttgtgattcaaaatgccccaaaactgcatcaggcctatttacgtgccatgtatgacgaatggaataaaatcacgcccgatttgaaagaacacaacgaaaaaatgtatcaaaaccaattacaatatttataatttattaacccctaaacaaacggaaaaatgtttaaaaaactttttggagccttaaccggagacaacaaacaggaaaatcaaaattatgaaactcaaacttcaaacaataattatgaaaatgattatgaagataacgatcaggaaacagaatatgatcccgaaactttacacggcacacattattctgtagaagatttcgacaatgaggtagcagaaagatctgaagcatggatcacagacgaacgcgcaagtggagaaaatcttgacgaaaaagacgttcaaaatatctactttaattacagaagagaagtatataaggaatggaacaactgtgattcagatcagatgattcgttttgagcacgccaattctttaaaatacagtggagttcaggtttcaggatttgtaaaagtagaggacaacaatccgtttttggagcccgtacatggagtagatttaagaacttatactgcaatgtgtcttaaaataagcgccgggatagattatcttgaagtatgcaaagcaatgggatttgaaccggcagtttgggaagaactaaatacgatctggccacagcgtatgggtgaagatacttcgtttacggttactactttatttggtcaatattatgccgaaaatgtaaccgtaccacaattagagaatctgaaagccgaaacttcagaagaaggagccgctaatcttgaaaaaatcagaacagatcgttacttctacgaagaacttgccggagccagacaggcagcttatgaatacggaattgatggtgctcagtggattctggaaaacttcggaattaatttagcggatttccaatctgttgccatgcaatggatgaccgagcaaaatcaaaactggaactctgaagacattaacgaattcttcaattaccaacaggaaaaacaaaaagagtatgccgctaaatttgccgcagaacaaggtggaaacatcgcagacgatatcaatttctaaattgaccttttttgatgataaaaaaaccgatttgcaaaacaaatcggttttttattcgttttaaaatttcttaaaattctttaaaagctataaaataatacctaatggaaaacacacctaccttctttgccgacggagaaaatccaaaaatgatcgaagcctatcaaaaagcacaagaaacctttaaatatttttggagagaattatcttgggaataccgccgaattgttccgggacttgacgttgcctgcgtaaaactagcctttactcaggaaattgatggtgaaactgtagtcgaacacatgtggatcaacgatatcaattttgacggtgataccatttacggcatcttagtaaatcagcctaacgatttaaccaatgttaacaatggcgacgaagtacaaattcccgtaaatcaaataagcgattggctatatgcgtctcagggtaaaacctacggagcctttacaatacatgcgatgcgttcagaaatgagtaaagaggaaagagaagaccatgatgaagcctggggtctagaatttggagattacaacgatattctggttgtttcagatcaaaaagaaaaaccggaaaacctcatagaacacccaatgagcaaaaacatgaaagaaagccttattgattttgtcaaaaataatcccgaagaacttagcgcgacagatgaacttggttatacttttttacatcgcgaaaccattgcaggaaataaaacctctgttgaagttttactgcaatcgggagcagacacaaaagttaagaccaacaatggcaagaccgcccttgactttgcaaaacaactgaactgggaacatttaattcctttgttgtagtttttagtatctaaagtccgatttgtcttagcatatcggactttttttttgaaatttctatgaaaataaatattaatttatagtaaccattaagagacctttttttaataataaagcactaattttgcggcacccaaaacaaatctgccatgaaaaaaatagtgctcgtagtaacattcgctcttcttttacctgcaatggttattgcgcaaaccaaaactgaaacgcctgatgtttttgcaaaatctactaattatgtaaatgattttgaaaaaatccttacttcaagccaaaccaaaaatctgagcgactttttgaaagccggcgaaaccaaaactaaaactaaaattactattgtaaccctctcctcaatagcaccatacactaatcttaccgattattcttcagaccttgaacagtatctggtttctaaactaaaaatagactcctctattttaatcgttttaagcaagcaactgagacaaattcagattcagggcgtcaataaactgcgtccaaaaatgagcgatcaggaaattaaagacatcgtatcagcttatgtattaccggaattgaaaaaaggcgattattataaagccttacaggaaggttcgattcagcttattaaaaaactggagtaagaaagtaacccgtttattgattacttattaatcaagaaaatagtaaatccgacctatgaaaataggttggatttttttgtcatttcgaccgaagggagaaatcgcactagaaactccgttgctagaatctccaatctttgtcgaatttaggatgtgattcctccctccggtcggaatgacacaaatcatttgcaacacctaataacgaaaaattatggtagcgtatgttttatcaaaagcaataattaaaagtcaagtaactttgacaaagaaattcctaaaacatttgcaatttcaagcaaagtgtaaatcgtcggattaacttttccgttttcaagtttttcaatagcttggcggtctttactacaagcccttgccaagtcagattgactccaacctcttttttctcgaagttcgacaatcctttgaccaattttcttttttaatacatctcgtgtcatttatcaaatgtcatacaatttgcttacaaaattgtcatactaaagattgacagatcgaaaaaataatttacatttgtcatgtaattatatgacaaatgaaaaattcaagaaaactgaaaattcatagaaagcatcaagcacgggcttacagaaaaaccataacgattccacaaataatacttgaaggtaaatggcttggtcgtcttggcttcatggcaggactgatggtaaatgtagaacaaaggaaaaacaaattgataattactgttcacaaggaatgattttgcgaataaaactcttcaatcagatacatttcaaagcactattttccttcaaaaaaagacggtacaaacttggcactttcaaacttttacacgcgattatttttcataactttatcactaaataaaaagggtcatgaaagaaatatgcattgtagaatttccgtcgaatctgggtttaaaagaacctcaacccggaaaagaaccgggcgtaaaaaacttacctgactggttatggaaacaccatcttcataaactcattcaccctaaaaatagtgtaagacttgatcctccaaaatattcaaataagcgggatcctgaaactcaaattctcaatagcacttcactaatcgattatgccagagagcaagcttatctgttaaacaatatactttctcagaacaaatttccgtttatcttaggcggagactgcagtatacttttaggaactgctatagcattaaagcaaaaaggaaattacggactgttttatctcgacggacataccgattttatggatatcgcgttatccgaaaccggaggtgttggcggaatggccgcatcaattgttaccggaaacggaactaaaaaactaaccaatattctaaatctgtgtccttatatcaaagaagaaaatctctggtgtgtgggaaatcgtgaatatgatgatgcctatgaaaatgaaattcgcaactcctctgctacctaccttagtttggatcacttgcgaaaccaggggattcaaaaaagtgtacaattatttctttcggaaatagaaaataagaatctcgatggtttctggctgcatatcgatgtcgatgttttaaatgacaccataatgccttgcgtcgacagcagaacacccgacggacttacttatgccgaatttaacgaactaacttcaatgctttttcaaagtaatttgttaaccggacttgaaattaccattttagatcctgatctcgatcctaccggacaatacaccaaagagtttgtaaatcacttttcggctacttttaatcaacatatcaatctggaggtataaaaactttttgtcctgattttgtcaaactaaaaaccgtattttagctactaccattgaagcaaaaaacacagccaaaacaattgcatcatgaatacagcgatacaagattacaatagtttacaaagcagttccgatcaggaaatctgccaccaactggcggtactaatcgacgaaaatctgccggaggccgagaataaaatctggcacgcacatccggtttggtttttagagggtaatcctattgtaggctacagcaaactaaaaaatgatgttcggttattgttctggagcggtcagtcttttgatgaagaacaacttgccaatgaaggctctttcaaagcggcagaatttcgctatacctcagtcgaccaaattaacccatccgacttaaaacgctggcttgcaaaagcaagaaaaattcagtgggactataaaaacattgtcaagcgtaagggagttttaatacgtctgaaataatttaaaaaagtattatattcaatctttgaattgaaaagcaatcctaaaaactttttaaatttttaaatggagaaagaacaactaatacaaatactaatctatttccacgccctgcttggcgctattgcacttgtttcgggattcatctcgttagtctctcaaaaagggaaaaacacgcataaaaaactgggaaaactcttttattacaccatgcttctgtcggccataagcgccatgattatttcggtactgccccaacatcaaagtccgtttttattttcaatcggaatttttagttcctattttgtactaaccggctacagggctttacgctttaaaaaaagcgatgtaaaccttaaaaacgacaaaatcatttcgggaattatgctcgttacggggcttgtaatgatcctgtacaatccgttaataaatcaatctatcaatattgttttaaccgcttttggcctcgttggactgtttttttcaagcagggatttaatgctttttaaaaataaaaccagactaaaaactgtgtggctaaaattgcatttaggaaaaatgcttggcggttatatctccgccaccaccgcttttgtagttgtaaatgaattttttcctggtttttacggttggtttatccccggaacaataggagcattttatattgtgtactggatgagaaatgtcgataaaaaacaaaccgcagtaagaatagaatagaattattgtcgaaagaggaaagaagaaagagcaaagaagagagataatttactccttaaactaagatgaaaaaacgcataacatatcaaattgattcttttacaaaagaaaaattcaaaggaaacccggcaggagttgtcgtaaatgcagacggaatgagtgactacgagatgcaacaaattgccagggaattaaacaactccgaaacagcatttcttttcgctcctgatggtcctgactgtgatggcattatacgctactttaccccaaataccgaagttcctatttgcggacacgctacaattgcagcaatgtatgcaaaagccatcgaagaaaagttagactcctgtattttaagatacaaaacaaaaattggtattctaccatttgaaatcattcggaaaaatgatgattatcaagttgtgatgacgcagggaagttttgaacttagcgccccttttaatgaaacgatcgcgcaaaaaatgataactgctttaggtcttgaaaaatgggaaatcgatgaaaaatgtccgattcagattgcttccacaggccattctaaagtaatgatcggcatcaaaagcagagcaacactaaacgctttaacgcctaactatactgctctggccagcttaagtaaagagatcaactgcaatggttattttgtttttacctttgattcggatgatacaactattttgacctatggtcgtatgtttgcccccggaattggcataaacgaagatcctgttaccggaaacgcaaacggacctttgggcggctatttgattcaaaacaaaattgttccttttactggtactgaatttcaatttaacggaagacaaggtgaaaaaatagatcgattgggagtcctacaggttaaagttacaattgccgataataccccacaattgattcagataaaaggtgatgccgttgccgctttcaggactgaaatagaaatttaacaataccttttcaactccttaattcactccaaaattacgatggaaataacagccttccgaaaaagcgactacgaacctttaagaactttattcttaaacgaaagacggcgtactttttcgtggcttgacccttctgaatttcaattaaaagattttgaccgcgataccagaggagaactgattttggtcgcaagacatcatgaagttccaattgggtttatttcgatctggatgaagaactatttcgttcaccatttgtatgttgacgaacagcatcagggcgaaggtataggaaccgaattattgaaagcggcaatccaaaaaacaaaactgcccatccgattaaaatgtttagaaaacaacaccaaagccgtcgctttctatctcaaaaaaggcttttttgctaccgaaagaggacaatcagaacacggaggttatattttgtttgaactgatagggagtataaaataaaacgcgaaagaaaatatctcccgggcattttttggacatcaaaaaaaaaaaaaattccgctcttcaaaaaaaacttgaagagcggaaataaagcttttagtttcttaacgtaccaggaaaagagcattgctaaacagtaaaactccattttcccaaaaacctctgaaaagcgggttatccatcatataaattacggtcccgtcccctcttttgtctaccgcaaaacttaccgtttcgttcaatttttttctaatatcgttgcctacaaatccatagctcaaataatctttcggaatgtacgccacattgatggccttttttagtaatgagaacgatctttcgttacttttaagactgaaatacgtatttcctaagccgaaagccattggataggttttgtccagtttattttcgataatggcaccgggaatcgaacccgagatttctcttcgctcagaaccttcaaagtccagaaaacgctttttaagttcgatctctttctcttctttttctgatttttctttatcttctttacttgcaaacaaactcagagcgtagccatcacggtcctgaaacaatgaaattgcattggccatggcaataacttttccgccatttttcacccattcatcgatttgttttttctgatcttccaccaggtcatagctaccatctgaaagaatcaaagtattatagttgtacaatttaactctgtttaaatttgccgtttctacaatactcaccggataagcaacggtttcatccagataaaaccatgtcgctccaaactcggttgaaactactccttttccggacaacattagtatttttggcgctttaagtagcgtaaaattctcccctccgatatctttagaattagtcgaaaatcctgtactgataaaactaaaatcggttttgactttgataatattgctgactgtcttttcaaaatcagtaatttttggattatcggctttgctgataattagtcctcccggctcgaccgtaacagttccgaaaactgcttttttcatggccgaacgaactttaattcccgcctgatgcagcaaagaaacaacctgtgccgacgttctgttattccacggaacataaaaagcgtaaacggattccgggatgtttttttctgcagactcgattttattctttgttttaatcggaacactatttttaaccgcataaccgtcaacaccataagctaaaggaagtgcccaggcggtaatatcatacgataaactgtcatttaatttttgattgggctcaaacaacacctgtgttaaaaccgatcttggctgatctgctttaataatcaaatcattaggctcaattttaaaactctcgttcttcttagtttgataatgaaatccggaggcgcttccggaagcatccgcgtaactaaattcaacatcattcttttgaagcagctccaccagctgttccaatttaggattatttttcaaaacatacgtattgtaaaccccttttgcttttttacgggcattgatatgaaaatctctaaaacctttcagcaatacttctttttgcgaggcggcactttctaccacggtcaaaactgcagctgcatgctgtgtcaagcgatcttttatggtaacattagagccgttttccatggttacttcacgtcctgcacctattccgcctttttccagcgtaagacctacggcgccattataggttggataggtatccccgtaactaggataaaacaaatcaaatcgttctctggtattgtacatccagttttccttgtcaaacttctgcgagatatttttacctaaaaccgtataaaaatccttctgatattgttcaataaattcatgcagaggttctgccgccggggggaaaaaataaggtgaattgtaactcatttcatgcacatcggtatgtacctgtggcatccattgattgtacaatttaatgcgctgctgcgattcaatttgtgtctgccaggcccagtcgcggttcaaatcaaaaagataatgattgtatcttccacccggccagacttccatatgctctctgtcatacaaacccggatgtgttttttttccggagatttctcgcagccagtttccatatcgcgaataaccgtcgggattgatgcacggatcgagaattacaatggtatttttgagccattgttttgtggcttcatttgaaggattcaaaagttcgtaggccacggttaaggcactttcggttccggcaaattcgtttccgtgaacattaaaactcagccagacaataattttattttcaactccacttgtttttttatctgatagtccaatggcagctaaattattgtttctgatttgttccagatttgccaaattttcgggagtcgaaatataataaacattcagatcccgctgttcgttggttgcgccgtatttttgttttttgatcgactgcgattgttccgtcaggtatttaaaatactcttcgacctgatggtaataactaatttgttttccgtaattcggaataaattctgaaggtgcttttaattgtgcaaaggcagaaaaagtaatggttaacagcagaactgctacaaagaatattttcttcataaataattttgttttagatggttggttaaaaataacaattaacttaatcccttttctaaaatcaccaggaatattatcattttacagaagctatttcgcaatttagcttactattaaaaattgttctgcttcttttctttcgggattaaatctgtatttttgttcatcaaaaaaacagcctgttacaatttaaaagaacagtccgcagcaaactgcaaaaatacatctgatgaaatgaaaatagaaactcatacgataaacaatacccgaatataaagtataaaagacttttcaactaaacaagattctctttgtaattcctatttttactccatcaaaaccaaatcaaaaaagacaaataccccaaaactctattatggaagaaacagcaattgaaaaatcagtttttgaagaagtaccaaccgaaaaaatctataccgacaacgcaatccgtgttggcactttcttaggaggacctttggttgcggggtattttttagcggagaattttaaggtttttggtgattccggcaaagctaaaagaacctggattataaccatacttgcaactatttttatctttgccctgatattcttaattccggaacacatcagtgctaagattccaaatatcgttttccctttaatttatatggcaattgccacttatttcaccaaagaatatcaggaaaaacaaattagcaaacacctcgaaaatggcggcgaacattttgcctggccgagaatcattctcatttcggttattggtatttcggttcttcttggcggaatattcagtattgcctttttaaccgaaacagcaaacggaggcctcacagagtcaactaaaaaatatggcattatgaatcatgaaattgcctatcaaagcaatattaatgaaaacgaagccgataaaattgctgaggcccttcaaaaaacaaacttttttgatgatgccataaccaagtatgtttacttagaacaaatcaataacaactacgaaatctctatttcatgcaacgaatcggttaaagacgacccgtcgaccgttgagccttttgttgtattaagaaacgatatacaaaaatatttcccacaccataaaatcattctgaaacttgtagtgaatgatctcgacaatgtggtcaaaagaattgagtagacctaaggcgctcctggactgctctcgctttgggatatgaaatgtgatttataaaatgtaagatgcaagccgaaaatctaacaatctaacaatctaattatctaattgtctaattatctaattgtctaattatctcctcaattttgtctcttcacgcccctaacaccctgataattaaaccctaaatttgtattctaacttttaaaaccttacccaatgagtgctacaaattttaccacagttataatcgtagatcagtctccacaggaagtttttgatgccgttacgaatgtacgcggttggtggtctgaagaaatcgaaggcaatagtgcgaaactaaacgatgaatttgactatcattacgaagatatccatcgttgtaaagtaaaaatcacagaagtgattccgaatcagaaaatagtctggttggtggaaaaaaattacttcaagcttacagaagataaaacggaatggacaggaactcatcctacttttgagatttcggaaaaagacggcaaaacggaacttcgttttactcatgtgggtttggtaccggaatatgaatgtttcgaaatttgcagaggtgcctggaccaattatatcgaaaatagtttgcttaaactaattacaaccggaaaaggagaaccaaacgcaaccggaaaaccacaaacagaaaacgaaaaaaaactttctgaaaaagaataaaaaataagctggaaagcatcatttaattgcgataccaactataattttcataaattcgttttactaaaacgatgactatgaaccctattttaagaaatacattagcagttataacaggtctttttgttggaagtattgtcaatatggctatcatattaatgagcagttctgtcattccacctcccaatggtgctgatgttacaactatggaaggactaaaagctactatgcatttgtttgaacccaaacattttctcttcccctttctggcgcacgcaataggtacgtttgcaggtgcgggaacaactgttttaattgcaatcagtaataaaacaaaacttgggctggttattggtgctttctttttacttggaggaattgtgaatgtgtgctcattgccttcaccggtttggtttacgatcacagaccttttctttgcctatataccaacagcgtatctggctataaaatggtttgcaaagaaagattctaaatcctaaaattccgctttataaaataatgaagaaaattgggcttgtgggaggaatcagctgggtttctaccatagattactacaaatttattaacgaaggagtaaataaaaaattaggcggacttcaatttgcggaatgtctgatttattcattaaacttgggtgatgtacaggaaaaaacttgggctcactcctatgaacttttatggaatgcctgcttaagtttaaaaaacagcggtgttgatgctgtcgttttgtgtgcaaacacggcacatatgtttgctcgtgaaatcgaaaatgaaattggactacccctaattcatatcggaacggagactgcaaaagtcattgtgaaagaaaaaatcacaaccgttggacttataggcacttcattttcgatggaaatggatttttacaaagatcgccttaaaagttttgggctgaatgtcctgatacccgaaaaacaggaaacgcgcgactacatacaatatgttctaaaagaagaacttggaagaggaattatcaatcccgattcgagacaaaattatatccaaatagcaaacgaactaattctgcaaggtgccgaaggtatcattttaggatgtactgaaattccactattgctaagtcaatccgatttttctgttcctgtttttgacactacaaaaatacattctcaagcaattgtagactttatactgtcttaaaattaaacacttaagcccgtttagtgcaattaatttcataacttagttagctcattaaacttaactctcatgactaagaaagaaatcgcccgcgactttttaaaactcgccgcaaacggacattcacacgaagcttttcgtctacatgtcggcgagaatttcaagcatcacaatgcttattttaaaggagatgccgaaacactcatgctggctatggaagaatcaacccgaaaaaatcccaataaaactttaactattcatcatattctggaagataaagatctggtcgccgtacattcgcacctgaaacaaactcctgctgacattggttttgctgtcgtacatatccttcgttttgaattggataaaattgtagaattttgggatttagggcaatccattcctaccgaaatgattaatgaaaatggaatgttctaaaagaactttattcttccgaattcagattcaaaaatctaaagatcaaaagtaatgttttaaatctttaaaaaatggcacaaaataaaaccatagaaacagaaaacagtgttgccgaatttatcaatgctgtcgaagacacaaccaaaagaaatgatgcttttgaactggtcagactgatgcaggaacaaacgggtttcgaagccaaaatgtggggaccaagtatcataggtttcggcagttatcattacaaatatgccagcggccgcgaaggcgatgctccattggtggctttttcaccaagaaaagccgcaatttcactttatgtttacgcatcacctgaaaaaagagaggagctactctctaaatttggaaaacacaaagccgaaaaaggctgtatctatgtcaagaaattaagcgatattgacctcgaaattcttaaaaaaatgatttccgtatcagttgagcacttacaagaactatatccccctcaataaaaatgattacaccttttctaattataattctgattttaggccttacactttacttctttttacagcacccgaagtttggtaaagcaccttcaggagagagattggcatggattcaaaaatcacctcaatttaaaaatggcaaattcgaaaatcaaaaccatacaccggaattagtagaaggctacggatatccaagagtattgtatgattttctccttaaaaaagtagacaggaagactccatctgatttaatcccatccatcaaaaccaatttactggaactttctccagaaaaagaggtgctgatctggtttggacattcttcgtatttcatccagcttgaaggaaaacgctttttaattgaccccgttttcagcggcaatgcctccccgattcccggtaccacaaaagcattcaaaggaactgatatttacacggttgatgatcttccggaaattgattatttactgatcacacacgatcattatgaccatctcgattatgaaaccattttacaattaaagcccaaaaccaaacaggtaatctgttctcttggggtaggttctcactttgaattttggggatttccaactgaaaatatcattgaaaaagactggtttgaaaaaatagaactcgatcagaatttaacgctttatactactccttcaaggcatttttcgggcagaagttttaaacgatgtaacacactttggacgtcgtttgtagtagaaaccaaaggttttaaaatgtatttgggcggcgatagtggttatgacacccattttaaagaaattggcactcaatttggcccttttgacatcgctcttatcgacaacggtcaatacaatcctgcttggaaatacattcataatttacccgaagatgttatcaaagctatgaaagatctgaatgccaaaagagtatttccggtgcattcttctaagttttcattggcaccgcattcctgggatgaaccactgaataaaataactgaattaaatgagttatcccaaaacccaattccgttgattactcccatgattggagaattagtggaactaaaaaatgaaaaacagcaattccggcaatggtggaaaggcataaaataacccgcattcttcaattaataaaataaaaaatgattccttcagcttatactctgcgcaatgcccacccttccgaatttgaagaaattggaaaattactcattagtgtttattcacaattagaaggttttcccaaagaaaatgagcagcccaactattataaaatgctggccaatattggtaattttacccatcaaccgcaaaccgaacttttagtcgctgctgacgaaaacaatacaattcttggtgctgtagtctattttaacgatatgaaaaactacggttcgggcggaattgctactcaggaacaaaactcagccgggtttcgattactgggagttgcaccaactgcccgcggaaaaggaattggtaaacttctaacgcaggaatgcatccaaaaagcggctgataacaaacgtactcaattgatcattcattcgactttagctatgaaaacagcctgggaaatgtatgaaaaaattggcttcagaagatctgaagacttagactttatgcagggtgaactcgccgtatttggctttcgtttaccgcttaattcctaaaactattgtgcaactaaaaaacagttcaaataatgaatacctctcttttaaatctgcagcctgaaattctggaagatgatctggttcaattactgccgcttcaggaaaatgattttgaaaaattatacaaagtggcttcagatcctttgatttgggagcaacacccgaataaaaatcggtatgaaaaagaagtttttcaaaatttctttgaaggtgctatggaaagcaaaggcgcttttctgatcatcgataaagcaaccggagaaattgcaggaagcacccgattttatgaatacaatcctgaaaacaaaactgtttttattggatatacattttacggaagaaaattttggggcaccggatttaatactcaggtgaaaaaaatgatgctggattatgcgtttaaagcagttgacaaagtccagtttcatataggagcggaaaattaccgttcacaaaaagccatagaaaaactgggtgctgttaaagtagaagaaataaacgttgcttactacaatgaaccatcccgtcataattttgtatacgaattaaaaaaataatgaaaagaataactgttttctgtggttccagttttgggaccgacaaaatttaccaagaacaggcagcactgcttggaaaaactttagcccagcaaaatatagagttggtttatggcggagcaaatgtaggcctgatgggcgctgtcgccgatggtgttctgaacgaaggcggaaaagctattggtgtattgcccaactttttaaggtcaaaagaaattgctcatttaggtttgacccaattaatcgttgtgaaaagtatgcacgaaagaaagaccaaaatgaatgatttatgcgacggtgttattgcactaccgggtggttttggaactttggaagaactttttgaaatgctaacctggggacaattaggtttgcataaaaaaccaatcggcattctgaacatcaatggcttttatgattctttgattgaactaaccaaagttatggtagagaaaggcttattaaagcctgtcaatcaggaaatgcttctagtgagcgataccattgaggatttattacatcaaatgagaaattacgttccgccagccacgggaaaatggattgataccacacaatcctagtatctgaaaaatagttgcagagaaattcttttcagacaaatcatagtgcctccggaacaagtatcggccaatcaatagttctaattttacagtattaacaaaaaactaaaatcatggatacttttattgtggatgctaaaaccattacattattgctggctaccttatttacaggacttttagccggaatatttttaacctggggcaacactgtaactccgggaattggaaaattggatgacatcaattatctcagagcttttcaaaacatgaatcgcaccatacagaatccgttgttttttctggtcttttttggttccttactgttttcttttgcagcggcttatttttataaatcaaatacaattgttttaagtctgacagttagtgctgcgattatctatcttataggtgttattctggttactattttgggaaacattccgctaaacgaaatgcttgataagacagatttggtacatacctcaattcaggaagcagcccttttacgaagtaaatttgaagcaaaatggaacaatctccaccttttccgaatcgtagcttctataatttcttttttacttttgatcattagctgtttagtaaaaacgaagccataaattttatacattagaggtcggggaaaaatgaaatataaaacttcagctttcacaaaactcctttcacatttcacatctaatcatttcacagaaaaaatgaaaacagaaaacaaccacttcgcaaaagccgaaatgctaatcagaaaacccgtatcagaagtttttcaggcctttacagatccggaaatcaccagtaaattttggtttacaaaaagttcaggaaaactaatcgccggaactacaaccgaatggacttgggaaatgtatggattctcgttaacggtaactactcttattttagaggaaaataaaaaaattgtaatcgaatggggaaatcctaatgaaaccaccatagtcgaatggacatttagtccgttaaacgaaaatgacacctttgtcagcatcaccaattcaggtttaaaaggagatccagataaaatcatcgatcaggttcgaaattctaccgaaggttttactttggttctggccggagcaaaagcttatttagaacatcaaatccagctgaatttagttttggatcgattccctaaaggattggaataaacaaccaagaacctgaaacctgaaactttaaacaatttaagaccatcaaatggaaacaaagaaaccggaaaacattgatgaatatattggcagttttccaaatgatgttcaggaaatcttagagaggattcgaatgactgttcagaatgcagctcctgatgccaaagaaaaaatcagttattctatgccggcttttgagcaaaacggaatcgtagtgtattttgcagctttcaaaaatcatattggactttatgctttgcccagtggacatgatgcttttaaagaagaactttcaaaatacaaatccggaaaaggctctgtacaatttcctttaaatcagcctataccttatgatttaattaccgaaattgtaaaattcagagtaaaagaaaatctggaaaaaataaaaaagaaataaagaggcacaaatctgacaacttatatactacttattaaacttcccaaaatgccacaaaacacctgaaggatcgtgcaaaaaacactcgcttccccaatcctgatgaacgataggtgttaattttactccatatttttccgttaagttaagcgccaaaagctgcttgtagtagtaatcgacatcttctacttctaaaaaaatcatggtgttttcattccagtttttatcgtaataatcctgaagataaaaggacaaatctcccgcttcaaaaacagaaaattttggatctaaaactccttcttcaaaacctaaatcccgatagaaacttctggaaatctcaaaatctttagctcctataaaaggtcggatcgatattgctttgtgattcataaatattcattttagaaattaataaatcaggtttctatttatcaaaaccgagttgttttcgcaaatctaaattcagtccgtattgttcctggaccgaaattatttttcgtgaatttttattaatatcatttccttcggcagtccataaaaaaggataaaagttaaaaacttcatcgcctttcaattttgatacttcggctctccatccgttccatctgttgccttgataaaacttatccagatcattatcaaaacagaatcctaaaaattccgaatacgtaatatccagctgttcgtactccagattatcaggagagaaataatacatttttccaacatcacttcccaatcctcctccgtttagaaggtagaaacctccaatagcatcgtcggcaactaataaaaaaggtgctgtttcgccaaaatcattaaacgatttccctttgttccaatccggaagcgtgcgattgaattttgcatttcctgaacccagaattctaatccagccatcgtcgatcaaaaggcctcccgtatggtatacaatagctcccattggcgagcgggtgctaacctgaattttgtacaaaacctcttttgcttttaaggcgtcaaccggcaaaatttctactttattttttgctgttttaatccattcttcgacctgagtccatcccgggtcgactttgtctataagttcttcggcttttttcattttattttgcgcagttgctgtaagagttaaaaaggtcaatacaattaaaggaaattttagtaccatcttagaaaattacaaattatttattctagccttttttcaaaatattacccaaccctcgaccaatttgttctattgcttccaggccttttgtcaatggtgtcgcagtgaaatcatcataggcatccattgcagtctctttgcgatcttcttgtccataaaccagaatcagattgttatcactaaatgatttttcaaatttctgcggcaatctgtcaaaaatcgattggtacgaaacggatccttttctggagaagttaaaaacaatcagatctgtagctttaatttcatctgagatcgattcaaaatcatcccagttcataatacttttaaaacctagtttggcatttaattttaatttagtagcaatctgcacaatggcctcatgtgttttgtattcagcataaacgacgatcggaatacttaattcctgagataatcgagagatcttttgcagcagcaggtgaaatccaacacctctttcggagaaaggcggacagatgaaaaccagtcttttttcctcaataaatgttttttgaaacctgcagatgaacaaacatttgtctacattattaatgatcgagtctacattttcaccgaaaattttatccaaaaaaccggtttttctaggccatcccacgatcacaatatcggacatgatttctttggacgttctcgcaattccacttgccggattatggtcgattctggcaatcgtattgattttcacttctgaagcagacccctgaataacaaatttatcaacggcttttcggtattttaagatattaatttcagcctgatcgttattcggtacaatcgttaatagcgtcaccggattagatgattttttatcttttatcaaaagtgcgaaatccagtaaactttccgtagccgacgttttggctaacggaatcaggatatgttcgtccagaatctgatcaccattggcatcttcatttgaaacttcctcttcacaaatagcaatctttttagccgctttttctgtcgcgaaagaagccacaatacaagtaatcagaattaaaataattgttccgttcagtatattttcgtctaaaatttttgctttaaatccaaccagaataacggctaaagttgccgcagcatgtgcactgctcaatccaaaaataagctgtctttcggttttggtatacctaaatacaatctgcgtaaaaaaggctgcgatccattttccaaaaatagccaccacactcaaagttcctgctacaattaaagcggttggtccgcttaggatcacgctgatgtctaccagcattcccactgaaatcaggaaaaaaggaatgaacaatgaattcccaataaactcaattctgttcatcaaagctgatgaatgcggaattaaagggtttagcgctaaaccggcaacgaacgctccaataataggctctactcctgctacctctgctaaaaacgcagcaaaaaacaccactgaaagtacaaatatataatgggcgtgtttctcgctttctaattttttaaagaaccatttcgctattcttggaataaccaaaaacatgatggctgagaaaatggccagcgaaaccgtcaatttaatccagaaagcctgattcaaacttccctgactgcttcccataatcaccgccaaaataatcaaaacggcagtatctgttaaaatagttcccccaaccgtaatagccactgcctgattttttgcgattcccagtttactcacaatcggatatgccaccaatgtgtgggtggcaaacatactggctgttaaaaaactcgcattaaaatcatatttcagcagataaaaacaaaccggaaaaccaatcgttaacggaaaaataaaggtaaaaaaaccaaacaataaactcttatttctattggctttaaactcattcatatccaattccagacccgcaataaacatgatatacaaaagtccgattgtcgaaaacaaatcaacagcagagttcttggccagaatattcaatccgtgcggtccaataatgactcccgaaatgataagcccgataattcccgggatattaattttttttagtaaaatcggtgacaagaggatgatgaaaaggatcaaagaaaaaatcaataccggattactgagtggtaattcgaattcttgtaaaaaatgcctgaaaaattctatcataatgtaattttatcttcttaacagtattttaattttccgcagaaaaaagcgccaaaagcaaaataaaatctcagaagttattatttgtcgtttcttcgaaaagcagaaaaaacggcttctttagtgattgtttcattacaaaaatacctaaaaaaaatgcgaactttctacgaaaatggcatattaagcaattaattttgtttcgttgccaaattattaatatttaatatttattttaacaaaactgcaacattaacaatagaaaattgagcgggattgcattattcaattatctttgtcttcataaaaattgcacaatggaagaatgtatctctgtttttgatatgcttaaaattggcgttggtccctcaagttcacacactttaggaccatggagagccgctgaacgttttttggaggagctgaaaaacgaatcaattttagaccagactaaacgtgtaaaagtcgatttatacggatctctttccttaaccggaaaaggtcatgctactgatttgtcggtgatgctgggattaagcgggcaggatcccgagtatattccggttgaaaatattgccggaattattaaaaacattgaagaacagcacgaaattattctggctaatgaatataaaattccgttttactttcttcaggacattgttttcaataaaaatttccttccttttcatgctaatggattaaaattcacagcgtataaagctgacgattctgaatatgaatctactttttattcgattggcggaggttttgtcgttaaagaagaacgcaccaatgctaaaatcaaagaagagatcaaatgtgccttccctttcccgattcaaaatgccgttgagcttttaaattatacagtgaccgaaaacaaatcgatttctgaaattgtttatgaaaacgaaaaatcaatgcgtccggaagccgagattcactccgaattaatgcgcatttggcataccatgttagaatgcatgtacattggctgccattcagaaggaattctgccgggcggtctgaatgttcgcagacgtgcttttgacatgcatcagaatttaatcggtttatctaactattcagatccgcaaagctggctggaagaaatcagaaaaacggaggttaaatttcgtcaaatcctgaaatgggtaagctgttttgcacttgccgtgaatgaggtaaatgcttctttaggtcgtgtagttactgctcctacaaacggaagtgcaggtgtaatcccggctgttttgatgtattatctggtaattgaaaaccataatgcaggcgaaaaagaaatcaaacaattcctaatggttgccggagagattggcagtatcttcaagaaaggatcaaccatttctgctgcaatgggaggctgtcaggccgaaattggtgtatcctcatcaatggctgctgcagcactttgtgaattaatgggtggatctcctgctcaggttttaatggctgccgaaattgccatggaacatcacttaggtcttacctgtgacccaattggcggtttggttcagattccgtgtatcgaaagaaatacaatgggagccataaaagcgatcaatgcggctgaactggcgcttgaaaccgattctaaaaatgcaaaagtgcctttagacaaagtcatcaataccatgtggcaaacagccaaagacatgaattccaaatacaaagaaacctctgaaggcggattggccattgccgtaaacatggcggattgctaaagaacatttgccacagattaaaaagatttgcacagattaaatacgtttgaattaagcttattaaagctctttttcaatccttttaatctgtggcgaaaaaaccacttcatgaaaaagcacttcttacttatagcaatactgttttgctctgctctgattcattcacaggaacgttactttcttaattctgatactcgtctctatacctcaactaataccgcaggcgactttctgggttattttaaatatggagcagaagttcggcttctttcggaaagtaaaaatggctggtacaaagtaagatctgacaacttctctgaaggttatgtgcctgagcaatttattgcaaaaaggttaaacgcaaaagatgttcaaacaaaggatcccgaaaatccaattattgaaggtaacgacaattactatggcagcagccatctatttgttttagtcgccggtttaaaagcaagagcactaccggataaaaactcaaaaatcagagccattctcttcaccggtgatcccgtagcggttaattatcttcccaaaaacccggacgaatgggtaaacatacaaggtcatagtgatcctgaatacgcacaatttacacttggaaaattccttggaaaaagacccgattttaattcgttactcaaagattttgataagctgaatatcaatgccatcacagaacgcaaaacgattggcgaaagaattgtagaattggcctggaacagtgaaaatgcaaaactggcacccgcttatcaaagatattatgaagttgtaaaacaattaaacgacccaaaacttctggccgatactgaactgaatatcgctattgccaaaggattagctaaaaccaaaaaaccggaagaaattaccgctttcagtaaaaaagccgaatttcttttaaaaggagtaaaaacaaaatcactctttttttcgcaaaaagatttagtcaaaaactttggtaaacctcctaaaaaaggaacagtaagcgacgaatgtggtatttacctcagcgagcttttttactactatccggattttgaagtttcagtagatgaaaaacaaaatcaggctgaaataacaaaggtttttatcaacgaaaacaacaaacttgttttcagtccgacggcttctctcgatcacagtctgaccgaaaaagcatttattgaaaaatacgggacttatatcggtgcttccatgaaaaatccgcatctgtatgctattcaactggaagacagtgaatttagaatagaattcagagacggaaaattatttacgattgaaataatcttctattgctgatttcaatctataattattcaatacttttacacattcaaaaaaactcaaaaatgtcagtagcaaaaaaagattataaaaagatcaccacaaagtcattaatcgaaatgaaaagcaatggagaaaaaatctcaatgcttaccgcttacgattttacaatggcaaaaattgttgataccgcaggaatcgatgtcattctggtaggcgactctgcatcaaacgttatggcaggtcatgaaacgacattgcctattactttagatcaaatgatttaccatgcctcgtctgtagttcgcgctgtagacagagccttagtagtggtagatttacctttcggaagttaccagtcagatccaaaagaagctttgcgctctgcgatcagaatcatgaaagaaagcggcggacatgctgtaaaacttgaaggaggaaaagaaattaaagaatcgatcaaaaaaatattaaacgcaggaattccggttatgggacatttgggtttaacacctcaatccatctataaattcggaacctacagcgttcgtgcaaaagaagaggaagaagctgaaaaattaattgaagatgctaaacttctcgaaaaaattggctgttttggtattgttttagaaaaaatcccggcacatttagccgagcaggtcgccaaaagcatttccattccggtaatcggaatcggagccggcggtggtgtagacggacaggttcttgtaattcatgatatgttgggaatgaacaacgaattcagccctcgtttcttacgtcgttatttaaatttatacgaagaaatgactcaggctatcagccaatatgccgccgatgtaaaatcgatggattttccgaattcgggggaacagtattaatttagacttgcttagactgcttagatgttagactgcttagatgttagactgcttagatgttagactgcttagatgttagactgcttagatgttagacttcttagattttatgattttatttgtcttaaaaaaaacaaatctaactaagtctaagaagtctaagcaagtctaagcaagtctaaaaatctaattaatctaaaagatgcatcaatttaaagagctgctaatttggaagaaaagcaggttattctgttctaaaatttacaatgtaactgctgattttccaagtgaagagaaatttggcatcacaaatcaattgcgaagggcttccgtttctattgcttcaaatatagccgaaggttcttcaagaaattctaataaagaatttgcgcgatttttagaaatcgcaattggttcagcatacgaagtagaaacacagcttcttatctcatcagatttaggttttataaacgaagaaggcataactgaattaatactgcttttagaagaaataattaaaatgacatcaaaatttagaactaccttattataaaatctaagtaagtctaacatctaagaagtctaagaaagtccaaaatgaaagtcgtttccaacaaaaacaacctccaaatcctacacgaagacaatcacatcattgtggtcaacaaacgtgtgggtgatattgtacaaggagataaaaccggggataaacctttatctgatattgtaaaagaatacatcaaagacaaatacaataaacccggagatgtttttctgggcgtcattcatcgtctggacaggcctacgacaggaattgttgtttttgccagaaccagtaaagcattgtcacgaatgaacgaaatgttcagtaatcgtgaaactcaaaagacgtattgggctgttgttaaaaataaaccgcaacaaaacactgcgaagctcgttcattatctcaaaagaaacgagaaaaacaatacttcaaaagcacatttaaaggaagttccggacagtaaactggccagtctggattataccgttttcaaagagcttcaaaattatgtggcactcgaaatcaatttgcataccggccgccatcatcagattcgtgcccagctggcagcgattggttctcccataaaaggagatttaaaatatggttttgaccgaagtaatcctgacggcggaatacatcttcatgcgcgaaaattagtttttgtacatccggtttctaaagaaaatatcacgataattgctcctactcccgacgagacgatctggaatgcgctatgattttatgatttaattgttaaaatttcaagttttatcgattaacttgcagaagcaaaaaatcaatcggattatatactatggactataaaaacaacattgcctacaggaaagaaacgttaaagaaactgttgtacaacattcagaaaagcgaagatttgattgtaaaagcgttgtacgatgattttaaaaagcctgaatttgaagctgttttaaccgaaaccaactatgtaatttcggatctaaaagataccattagaaacatcaataaatgggcgaaaccaaaacgtgttttgccttccctgctcaatttcccttctaccgattatatttttaaagaaccttacggaaatgttttggtaattgctccctggaattatccgtttcaattggctttatgtcctttaatttcagctgtagcagcaggcaacagagtggttttaaaaccttcagaactgacacctcatacctcagcagtgattgctaaaattattgagaagacctttcacgtcaaacatgtagaagttatagaaggcggtgttgaagtttctaaccaattactggcacagcgctgggattacattttctttaccggaagtgttgctgttggaaaaattgtagccaaagctgctgccgaaaatttaactcccgtaactttagaactaggtgggaaaaacccgtgtattattgacgaaactgccaatttaaaactggcggcaaaacgaatcgtatggggaaaattcatcaatgccggacaaacctgcattgcaccggattacatactggtacagaaaaatatgaaagtcaattttatatcttttctgatagaagaaattctcaaagcttacggcaaaaaaatagacaaatctcctgattttgcccgaattatcaataccaaaaactgggtccgactagacagtatgatcgaacgtgaaaaggttatttttggaggagaaacagctgctgaaaaaaactatatctctcctactttaattgaagaacctgctttggacagtcccgtcatgaaggaggaaatatttggtcctatccttcccattctgacttacgaaactgaggctgatattcacaacgtaatcagtcgttatgaaaaacctcttgccttttatgttttcagtgaaaataaaaattttgctaaaaaactaattacttcccattcttttggaggaggctgtatcaatgataccgtggttcatttctcaaacaaaagattaccattcggaggagttggtcatagtgggattggcgcttatcacggacagttgagttttgatattttttcacatcacaaagctgtcgtaaaaaaaggaaactggcttgatttacctatgcgttacgctccttacaaagacaaactgatatccctaaaacgtttactgaactggttgtaaggttaaaaaaaacaatttcgcaatgttttcaagattttcatatcaaattgattaaaaatattatatttacggcacattaattatttaaaatttcgtcgatataaaataattctactccaataaaaatgaaatctacatccgatcagatcaaagacattaaaaatcatggctataccttagatttttcaactgttttcaatcatgcttttgaaaattacaagaaaatagccgtctatgccggattaatgctgttggttttttcggtattctttggcattattgcttatctcatactagttgcattttttggtatcgacaaattaaccaatgcaaactttctgaacatacagcctcaaaatctatctcaaatttatctggtcctttatattattggaacagccttagtatcggcaattatgagtccttttactgccggatttctaaaaatggccgattgtgcagaaaaagatcaggaatttaatgtctctacaattttttcctattacaaaagccgccatttcgcacaaatttttgcagcaacctttttgatttcattgtttagcgttatcgttactacctttttagaagttcaaaaattaaatgccttaggattagttttctcactgacattatctttttttaccttcttaaccattccgcttatcgtatttgggaacttaaaagccgttgatgctattaaatcaagtctcatcttgataagtaaacagcctttgatattattaggactgataattactatagttggagctgtactggttggcctttgtgcattttgtattggagtactttttacgatcccttttagctattccatgacttatgccatatattgtgctattgtaaaaacggataaagaagatcctattgactctatcggtcagtctgatttttaaaaaaatataaaatttcaaccaaaaaagagtctaacctgctctgttgaatttttcaaaataaaagatttactaaaccaaacatacccccgaattctatggtagcaaactatagtctcttcaattcgttgatcccaggagttgccatacttggtaatgccctgaaatcaattattacgaagtggtatgtcatcaattcagacatcatattttacaacaatcctaaactcatcatgttaggtttgtcgatgattgcctttctgacccttctcgtataccaattcttccggatcaagagcagaattggctacttcatcgaaagaaaaccagaaacagaaacagtaaacagagagtatcatctctatattttgttctttggtattgcattgattgtaatcgaaatcatcaatgaaatttttaaaatcaggccaaagagtttacttttcgtaaatgtaagtattggcttcgcgatgcttttgttttatttcataattggaaaaattgaatttttaagagagcgggtacagtccatatttattttatccttctttgtttatctcttttatgttggatacaacatcgtccatcgcaccaacgatattattcctataattgcttttttaatcttcttctacttctcctacagcatcctaaaacccataaaattatactggttctttgttggattagtttttacctttctgattacaacagttgtttatcagttaattcccgtaaaatcatccattatcttaatcaactactgcgtactgatcttcattcttaatcaggttaaatatgccgttttactaaacaacagtgataatttcagattcaccaatgaaattgtacacaaaggaaactcactgactattgctacaaacgaaaaaaacgaagtcttgttttgcagtgagacgatcacttctattctgggatatttaccggacgaagttatgggggctaaattttggaaattaacgaatgaaacagactatcctgaaaacctcagcaatataagtcatgaggaagacaaactctacatccggaaactaaaaagtaaaaacggggaatacaaatacatacaatggaaagacaaaagattctctcaatgtctgataattagtatcggccaggatgttacggaacaaatcacggttcgcgatcaatacaaaaatctgattcagactgccacagatatcatttttgaaattgattctgatggttattttactttcatcaatgactttggattttcgatattaggatatgctgagaacgaaattatcgcacagcattattctaatttcatccatgaaaactatcagcgtaatgctgtagatttctacgaaaacctggaaatgaatgaaaataatttcccaactatagagattcctattctgaagaaaaacggaaaaaagctttggatttcgcaaaagattattgtgcgaaaaaatgatctaggacaaacaattggctttgccggaatagcccgcgatattactgaaattagaaatattgagaacgacaaaagaaaacgtctgaagaaaatcgagtcatataacaattcgattaacaaactctcgactacagattttagtcaatacaacaatttaaatacggttattgattacatcataaaagaagccgcaattgtaaccaaaaccaatcgggtgagcttctggaaatgtcataaagacttaatcagctgcaagaatcttttcagcattgacaaacaacatcttaatgacaaaaatatattggacaaacaatcttatccaatttactttgaaacacttaaaaacaaagcaatcataaatgccccagatgttttcaataaactcgaaacatccgaatttcaaaaattgtactttaccaaaaaccacatcaaatcgatgctggatgtacctatctttttaaacggacagcttgttggagttgtttgttttgaaagcaccgaagaaaaaagaaactgggacaacgaggacatcaattacgcccgtaccatttcggatgtaatctcattggcaatctcctcacaaatgcgtttggaagctgaaaaaaaattagaattcaaaagccagctattgtctgcactttccctgtgtaccgagaaatttctgatgagtaaatctactcaggaaatgtttcaggaaacctacaatttaattggaaaagcagccaaagtagaccatatgtactactacgaaaaagatttcacaacaaatactgtaagccagaaatacaaatggtccagacagggtattgagcatcagatcacaaaattacaacgattaacaaaagatcaattgcaagaaatttatgaggccgctcagaacaaaaaaatcgtcaatacccttacccgcaaactcgacgatactttttttaaacaactactgattgccaatgaaatcaaatcgattctgatactaccgctgtacatcaacgatatttttaccggattcataggcttcgacgattgcaccaaagaacgaaaatggtctgaagaagaaatttacatctttcaggtcctggcaaataacatctcatcggcactggaaagaaaccgaaacgaaaccaaaattctcgaaagtgaggaaaaattcaaattaatcgccaacaacattcccggcacggtatacttgtccaaatttgatgctttctccactaagatatttcttaatgatgaaattttaaaccttaccggttattccaaatcagaatttattgagaataatttatcctttttatctcttattcatcctgatgacaaagacgaagtggtcaacaaccaaatcgataatttacaaagtggaatgccgctgcacaatgtatatcgcatccgacggaaaaccggtgaatttatctgggtagaagaatttggagacgtgattaaaaaaggggatgaaattgaatttgtgggtggaatttatttcgacattaccaacaaaaaagaaagtgaagatgccataaaagccaaacagcttgccgaggcagccaataaatctaaatcagatttcctggccaatatgtcgcatgaaatcagaactcctttgaatggtattattggtttcacacatttactgatgaataccggccttgaagaaattcaggaaaaatacatgaccacgatcaaccaatcggcgcattcactactggatatcatcaatgacattcttgacttttctaaaatcgaagcgggaaaactggaactttttatcgatctatacgacatcaaaaaagtactcggacaagtttttgatttaatcgtctacgaatccaatcaaaaaaatctgcagttagaattaaatgtcgcacccgatgtccctaaatacatctggacagatattgtgcgtatcaaacaaatcttaattaatctgctttcaaatgctgttaagtttaccaacgaaggttctatcaaacttaatgtttcagttctggaaaaaagcaacaacaacgattgcataatccgattttcggtggtggataccggaattggaattctcgaaaaaaatcagaagaaaatcttcaaagccttttctcaggaggatagctctacgacgagaaaatttggaggtacgggattaggactcactatttcaaatcaattgctcgctttaatggaaagccgcttacagttagaaagtaaaatcgacgtaggaagtattttttatttcgacctgaacttaaaaactagcaatcaaagcattagcgagaaatacaataccgaacttcaaactatcggtctcgaactaaattctgacgacccggtttcaaatcaaaaaaacattacctttttgattgttgaagacaacaaggtcaacatgctgcttttaaaaaccatcatcaaaaatttgtatagcggtgcctacatacacgaatgcgaaaatggttacgaggccgtaagtcaatttgaaaacatcaatcctgatttggttttcatggacattcagatgcctattatgaacggttatgaaaccacaagagctatcagaaataccattacaggaaaagacattccgatcattgccgtgacagctggtgccgaaaaagaggaacgcaacaaatgcctttctgcgggaatgaatgactacatctctaagcccataatgaaaggtagtgtagaagaagctttggtaaaatggttaaaataacgcaaaactaaattcggctattacgtcattattcctaaaaaaaatataaattcgtacaacacaaacctttacgaactaaaattcaattactatgaaatggaaaggaacgcgagaaagcgataatgttgaagaccgaagatcaatttctggcggaaaagttgccattggcggtggagttatcggtataattattctattattaaatgtttttggtggtgaaaccggccaaactgtaggtaatgtattagagcaaatgcaaggcggacaacaaaccactgaaactgctgccccattgagtaaagaagatgaagaaatgggacattttgtaagatcagttctggctaaaacggaagacacctgggagaaaaaattcgcagcagaaggacttacttataaaaaacctaaattggttctctttaaaggctctgaacaaactgcatgtggtggagcttcatctgcatccgggccgttttattgcccgggagaccaaaaagtatatatggatttaggcttctttgaagaactaaaaactaaatttggtgcccaaggtggggattttgctattgcgtacgttatagcgcacgaaataggccatcacatacaaacattgctgggaacctcggcaaaaatgcgacaggcacaggaaggaaaaagtgaagcagaagccaataaactgtctgtagccctcgaattacaagccgacttttatgccggagtatgggctcatgacaaccaacaatatatagaagctggcgatatcgaagaagctttaagtgcagccaacgccgttggagacgacgccattcaaagcaaaatgcagggacaagtggttccggattcctttactcacggtacatccgcacagagaatgttctggttcaaaaaaggtttccaaaccggagacatcaaacaaggtaatacctttgatgaaataagatagttcacaaactaaattataataaacaaaaaagcatgattttttttgaatcatgcttttttttcaaaatatcaaaaaaactacttttattaagacaagagtatttttttttaatttataactgtaaaactttatataatcttaatttacgttaaactttcataaagagagtctatatgaggaaaccctcttaagtctataacatttgtgctttgtcttctacctttccatttcataccacctaccacagttttcatttccttaccagaaagagtttttacagaactcaaatccatttttttaattgtttttttcattggttaaatttttagtattaataaatcaataatctaacaagaacatcttatgactttaccagatagactactgtttcaaatataagactttatccttataacaatgaaataacaataagtttttacttaaaaaaaaataagtactaatatttaaaagttaaatttcaaatcaatacccatttttgagcttgagattttaaacacaaaaatcgaaaacccaattacaacaacaaaaaaaagcgtgatttctcaatcattcttttttggttaaaaacgatccgaacttatgttgattattttgaaaccttaaatgttgtagcatagatcaaaacaaacattttcttgctgttctggtctattacctacataataaattgaatgataatacgaatgtaagcaacaaccaccttatctagaaaacaaaaaaaactaatcaccagtactttccctcacctagcacaatatccttttatcattcagagtgatgaatataaataaaaacccctgaatcgaaattgtcctttagattttttttgcaattattggggtttattacaaattattcaaattccaaattttaaattcgattcaggagaaatgctaggatctaccttacagtgctaccatttttactttaatagaccatactcttataggttaagtacttatttttttttacactgtaaaggtagcactgaatttcaacccattacatgattaaaatcataggagattattttttttatttgatcatgacattctgtagctgatctgatctttgctcttctggacgatactaccctataacttaaatcatagtgctttgcactatgctgttgctaaggctctttcagagcaacagcttactatattccccacaaagctcgaaacggaagcctgaaacttggaattcggaatttgaaacctgaaacctgaaacttaaaacccaaaactcgaaacttgaaacttgaaacccgaaacttgaaacttgaaacctagaacccgaaacttcaaacctgaaacttcaaacctgaatttatcaaatcctcaaggcttcgtttttgtataaacacaaaaaaagccttgaatttcttcaaggctttgatttctgggtggctgaccgggttcgaaccggcgacccgcggcaccacaaaccgctactctaaccaactgagctacaaccaccatttttttttgcttctgcatttctgcttagcgagtgcaaatatataactaatgttgagttctacaaagaaaaaaatgaaaaatttacagtaaattttctaaactattgacagccaaacacctttcaacagtaaaaccttcagcaaaatctttaccaacaagccttcctaaatccttcgcacgataatctaaactttcaaagaagtttttactcgtaattggtgtagctggttcttttgaatttgggtcataaaactgagttttatatgccgaaaccgcttcaacctttttcttttcaaaacctgtaatatccactacaaagtccggcacgatgtttttccactgtatataatgatacaccacctttggtcgccaggcttcctgacgctctccgtcgatcgaggtttcgatttttgccaatccagacaagaagcaggcatccgaaactaatttactgcctttcccgtgatcaatatggcggtcgtcaattgcattacacaatacaatctctggtttgtactttcgaatcattttaatgacctccagctggtgtttttcatcattcgtaaaaaagccatcacgcatgcccagattttcacgaaccaaaactcctaatatctttgctgcctctttcgcttcttcatctctgatttccgccgtaccacgcgttcctaactctccacgtgtcaaatcgacaatacccacttttttacccagtgatacttcttttaaaattgttcccgcgcaacccaattctacatcatcaggatgtgcaccaaatgctaatatgtctagtttcataatttttaatatctgtttcaaaaatcaatttcaattacaatactgaaaatcaaaattgatgttttgtctattctctttactctattctctttactctttactctttactctattttctattctctttactctattctctttactctattctcttttttttgtttcaggtttcaggtttaaagtttcaggtttagtcgcagtcgcagtatacagtctcagtaactgaaaactgcgactgcgactgaaaactcataactcataactcataactctcaacactcttttcattgtcatcgacttgttcacgctttcctcccactccttttccggaacgctttcccttgtaataccacaccccatgtaaagaatcaccttattctcctgaatttgcatgctgcgtaaatttacgtagaaatcagaactgatctcatcatgagcaaaactgctgtttaactccccgagaaatcccgtataaaaagtcctgtcgtaattttcattttcaataataaatgcctttgcctttttctttggcagaccgcaaactgcgggtgtcggatgcaatgtatcgattacttcctcaagcgtcgaattctcattcaatactcccgaaatatctgttttgatatgccagatcgatcccgcttttacactgtaaggttcagatacatccacagaagaagctacttcacgtaatctttttacaataaagtcagttacatattgctgctcgtctttctccttttgctgccataagatatccgtttccagggttgctttttgtgttccggccaaagccactgtttcaaaaacatttccgttggctttcagcagtcgttccggtgtggctcccatccagaaacctatttttggatgaaaaaaaacatatgagaaagtcgtgggatacaattgaatcaagtgctgaaaagtagacacaaaatcgaactcgcttaaagttacttcttcgcttctggataatactacctttttgaattcgtcattttgaatcgcctgaattccttttgaaaccaatgcttcgtagtgtaatctggctttgttatcaataactggatcttccatttcagcagtctcaaaagcaatttccagttgttctgctgttaaaatttcagattcattctccggaatcaatatcagttgtttttcatcaaaagaagcaaaaacaaagcctttttccttgtaatcggagattttatgcaacgtatcattttgctgcaaaagcgcaaaaatagtggtagaattcggtttagagtacattacaaaaggcaaacacttttcgtactgtactttaattttagaaaaaaaatcattcatacttcctatactgttttctttttttccaaaaccatattggtcagtttgcaaatcgaaatcagatttccttcttcatccgtaatcttgatttcccacaagtgaatacttcttcctttgtgaatgattcttgccgttccaaaaacccatccttcccgaatacttttcaaatgatttgctgaaatctcgattccacgtacttcctgttctttcatatcaataaaaaagaaagacgctgcactaccaacactttcagccagagctactgaagctccgccgtgtaacaagcccattggctgatgaacagaaggatttacaggcatttttgcagttaaaaaatcaggccctgcatcgatatattctatttttagcgtttccatcaatgtgttttttgagaactcattacagcgcgctaaaatctgctcttttgtataattcattaaaatagtctttaaaaacgtaaaattaaagaaaagatgagatacaaatttgaaaatcccattctaaaattaaaaatccacttcaaacgtgtaagttttttgttatttttacaaaaacattaattgttaatctgttgcagatatttttttgataccacagattacacagattttcacagattagaatatctcttcaaagagtaaaaaactttttagtctttattaatccgtggcaaaaaaactcattcaaatgcgtcaatactttgtactcttcattttcggaataattctagcttttagttcttgccgaactgattttgataccgttgccagttccggagatttaaagttttctaaagacactgtttatttggacactgttttcaagaatattggctctgctacctatcagcttaaagtatacaaccgaagtaaaaacgacatctccattcctattattcagctcaaaaacggcttgaattcaaaatacagaatgacagtcgacggtatgagcggaaacaatggtaaaattttcaaagacgtcacacttttatctaaagacagtttgtacatttttgtagaaaccaccgcagatattacagatgcaaacccaaccgattttttatataccgatcagattcagtttgacagcggcgctaatcttcaacaagtcgccttggtcacactcattcaggatgctgtttttctttatccacaacaaaatcctgacggaaccaaagagaaaattaaaattgaaggcaaagaggtagatggtttttacctgaatgataacgatcctgtcaacggaaatgaattgcttttcaccaaacaaaaaccttatgttatttatggatttgccggtgttcctaaaaacaaaacggtggcttttgaagcgggtgcacgcgtatactttcatactaattcaggtctttttgtcgacgataaagcttctttacaaattaaaggaaccacttcttcaactccaaaattagaaaatgaagttgtttttgaaggcgatcgactagaatcactttacgataatattcccggacagtggaactctgttatttttgctaacggaagtaccaatcactctatccatcatcttaccctgaaaaatgcggtcattggtttaaatttcaagaatccggatcctgcttcgaccattgaaatcaaaaacacccagatttacaacactgtcgaatatggaatactggcacaaaatgcccgtataaatggagaaaacattgttatcaattatgccggtcttgcgagtttatcttgtgtatacggaggagattacaaattcacacattgcaccttcaacaacagttggtccaataattctcaatttgcagttagtttaagcaacagcctggccaatgctgttccggaaacaaatccgctgacacaggcgacttttaacaactgtatcatttacggatcgggaaccaacgagttcaatttaagcaaaaaaaacactgccgcctttgtgtaccaactcaataattgtttgctaaaattcagcagttcttccaacaatccggattatcagttcaaaacagatcctgcacactacaaccagatcattctgaacgaaaaccccaagttctttaatgttgctaaaaacctgttcaacattgacaatacttcttccgctttcgcgaaaggaaacccggtctacaatattcctttagatattattggaaaaaccagaacttctccaccggatttaggagcttatcagagtgccgcttttcctaagtagttttatgtcctctaaaatttaacttcgacagatttctctcctttcatgtcatttcgaccgaagggagaaatcgcacgcagaattcgacaaagattggcgacaattgggttggagttgccagtgtgatttctcgttcctcgaaatgacaaactgcattcaattcatggaaaaaactccgcacgttaagtcttttctttcccaaaaaagcagtcgtaagaaaatatatccaaaattaaacatcacttaacttatataattcataaaaatagtagatttgctaaaactgattttcaacattctaaaattcagtattttaaaaacaaaaaacaaccaaatcttaaagactattaattatgaaaaaaaactactttttactgttattgatgtttgccgcaacggcatttgcgcaaattcccaccggctattacaacaccgcaacaggaacaggttacacattgaaaacacaattgtacaacattattaaaggtcataccgataacggatatgcaggattgtacaccacttatcaaacctccgatgtcgataattttttcgaaaacgacggaaccgttttagacatgtattccgaaaacccatccggaacggatccttacaattataccacaggatcaacacagcgttgtgggaactacgtttcagaaggcgattgctacaacagagagcatatcattccgcaatcggtttttaacgaacaatctccaatggtatccgatgcgcattttatcactccgacagatggaaaagtaaacggaatacgatccaactatcctcacgggaatgttagttctgctacttacacttctcaaaatggaggtaaattaggctccagttcggtatccggatactcaggaaccgttttcgaacctataaacgaattcaaaggcgatattgcccgaatgtatttttattttgccactcgttatgaaaataccgttgcaggttactctttccctatgtttgacggatcaggcaataaagtttttactacggcattcttaaatcttctaataacctggcacacacaagatcctgtaagcgccagagaaattgcccgaaacaatgccatctatgcccgtcagaacaatagaaacccttatatcgatcatccggaatatgtcaatcaaatttggggaggaacaccttcttcagacacgcaggctccaactgcaccaacaagcttagcttcgactgcaaaaacagcaacttctattacactatcctggactgcttctaccgataatgtagccgttacagcttatgatatttatgcaaacagcgctttaaaaaccactgtttccggtgtaactgcaactataacaggtttaaccgctgcaacagcttattctatttatgtaaaagcaaaagatgccgcaggaaatgtttccgcttcaagcaataccatttcagttacaactgacagtggcggaaccggaactacaacggatctccttttctctgaatacgttgaagggtccggaaacaataaagcagttgaaattgctaataacactggaagttctgtgagcttagcttcgtatacgataaaaaaacaaacaaacggctcaggttcctggagtaccggtttggctttaagcggaaccttagctacgggaagtaaatttgtcattgtaaacagctccatatcttcaagctgctattcaaccagtgcggctaatatttcgacaacagcaaccgaaatggcctttaacggtaatgatcctattggtttattcaaaaatggcgttttaatcgacatcatcggaactttcaatggtggaactgctaatttcggagccgacgtaactttaagaagaaaatcaaccgtaacttcaccaagtactacttttaatctgagcgcacaatgggattcattttcacaagatacctgtgctaatttaggcagcaaaaaagtacagcctactgcagcagaaggagaagaaaaccttgcggattataacggaatcatcgtttatccaaatccttctgacgggaattttaatataaatttaaacgaatctggctcttcttatgctgtagaaattgtttccttttcaggacaaaaagtttttgaaaaacagaacgcgacagaaaacagcatttcagtaagtcatttaccaagtggtatttatattttaaaaattgttaaagattcgaaaactatcatcaggaaaataatcattaactaaaaatactttttcacgcagatttagcagattttttttggaactacttataaatagttccggcattcttgaatctgctgaatctgcgtgaaaataaaaactttgcacgacaatatcccaatttcagaacggtatcatattttttaaaagagtttgttttcaaatttgcgcttgctagatatttaaactaaatttgcacttcaatacaacaaactacacatcacaatgatccatttctttgaaaaccaaagcaaaactgtttttgcagtacagacgcaaaacgaaatttcggctcaagacatttcaaaactaaactggctttttgccgactccaataagatcgaaaaatccgcactgacggatttttttgttggtcctcgtgccactatgatcactccatggagtacaaatgctgtagaaatcactcaaaacatgggtattacgggcattatcagaattgaagaatttcatccggcaacagctgatttttcagattttgacccaatgttatttcagaaattcagccaattagatcaggaaattttcacgatcaatgtgcagccggaacctattctggaaattgatgatattgccgcttacaatacaacagaaggattagctttaagcgaagaagaagttgattacttaaacaacctttctactaaattaggaagaaaactaactgactcagagatttttgctttctcacaggcgaactcagagcactgccgtcacaaaatcttcaacggaacatttgtgattgacggagaagaaaaagaaacttctttattcaaattaataaaaaaaacatcacaggaaaatcctaacgatattgtttctgcttacaaagacaacgttgcttttgtaaaaggaccaaaagtgcagcagtttgcaccaaaaacagctgacaaaccagattattacgagataaaagaattcgattccgttttatctctaaaagcagaaacacacaacttcccaaccactgtagaacctttcaacggagctgcaaccggttccggaggagaaattcgtgaccgtttagccggtggccagggttcattgccattagctggaacagcagtttacatgacttcatattctcgtctaaacgatgacagaaaatgggaaaatgctgttgaagaaagaaaatggctgtaccaaactccaatggatattttaatcaaagcttcaaacggagcttctgattttggaaataaattcgggcaaccgttaattacaggttcggttttaactttcgaacattcagaaaacgaccgtaaaattggttacgataaagtaatcatgcaagcaggtggaattggttacggaaaattagatcaggcaatcaaaaagaaaccacaagaaggcgataaaatcgtaattcttggaggagaaaattatagaattggtatgggtggtgctgctgtttcgtctgcagataccggagcttttggctcaggaatcgagttaaacgcaattcagcgttcgaatcctgaaatgcaaaaacgtgctgccaatgcgattcgtggtttagtagaaagcgataataacccgattgtttcgattcacgatcacggagccggaggacacttaaactgtctttctgaattggtggaagaaaccggaggattaatcgacttagacaaattacctgttggagaccctactctttctgcaaaagaaattatcggtaacgaatctcaggaaagaatgggattggttattggtcaaaaagatatcgacactttacaaagaattgccgacagagagcgttcgccaatgtatcaggttggagatgtaacgggcgatcaccgttttacattcgaatctaaaacaaacggttcaaaaccgatggattacgctttagaagatttcttcggaagttctccaaaaacggttatgaccgataaaacaattgacagaaaatatgctgatgttgcttacaacacagcagatttcgaaaattacttaaaagacgttttgcgtttagaagcggttgcctcaaaagactggttaaccaataaagtagaccgttgtgtgggtggtaaagtagccaaacagcaaaatgcaggacctttacagttgccgttgaataatgttggagttatggctctggattatttaggtaaagaaggaatcgctacttctatcgggcatgctcctatcgctgctttgattgacccggttgcgggatccagaaatgctattgccgagtcattatcaaacatcatttgggcaccaattaaagatcagttaaaaggaatttcattgtctgccaactggatgtgggcttgcaaaaacgaaggtgaagacgctcgtttgtacgctgccgtagaaggttgttctgaatttgcaatcgaattaggaatcaatattccaaccggaaaagattctctttcgatgaaacaaaaatatccaaacgacgaagtaattgcaccgggaacggttattatttcggcagcaggaaactgtaccgatatcaaaaaagtagtagaacctgttttacaaagaaacggagattcaatctattatatcaatttgtctcaggatgatttcaaattaggaggctcttcttttgcacaaatcagaaatacaatcggaaaagagacttctactattaaagacgcttctttcttcaaaaatgcttttaataccattcaggaattaattggtgaaaaccaaattttagccggacacgatatcggaagcggtggtttgatcacaactttattagaattgtgttttgcagatgtaaaccttggggcaaaaattgacttcagcgctttcgcagaaaaagacttattgaaaatcctttttgcagaaaacattggtattgttttccaggcgaaatcagatactgctattgaagctaaattaaatgccaacaacatcgagttctataaattaggaaaagcaacaacgaccgagactttagaccttggaccttggactttagacataaaagcttacagagacatctggttcgagacttcatatttattagatcaaaaacaatctaaaaacggaagagctcaggcacgatttgaaaactataaaaatcaggttttaaattatactttcccaactcattttactggtaaaaagccagtcatctcgagcgaagtcaagagaccaaaagcggctattatccgtgagaaaggaagtaattctgagcgtgaaatggcaaatgctatgtacttagccggttttgatgtaaaagacgttcacatgactgatttgatttcgggtcgtgaaacactggaagacattcagtttattggagctgttggaggtttctctaattctgatgttttaggttctgccaaaggatgggccggagctttcttatacaacgaaaaagcaaaaaccgctctcgataatttctttaaaagagaagatacgctatctgtcgggatttgtaacggatgtcaattgttcatggaattagaagtgatcaatccggagcatgaagttcacggaaaaatgcttcacaatgaaagtcagaaacacgaaagcatctttacttctgtaaaagtacaggaaaacaactcggttatgttatcgacattggccggaagcactttaggagtgtgggtttctcatggagaaggtaaattcaaattgcctttagccgaagaaaactacaacattgtttctaagtatgcttacgaaggttatcctgcaaaccctaacggatctgattacaacacagcaatgttatgtgacaaaaccggaagacatttggtaatgatgccacacattgagcgctccaccttccaatggaactgggcacattatccaaaagacagaaacgacgaggtttcgccttggcacgaagcttttgtcaacgccagaaaatggattgaaaaaaactaaaaaatatattataatttaaaaacgtccgaattttgaacatgccccaaaaagttagacactatttggggcattttttatggaattaaaagctccatatttcttcactccagaaaaaaacaattcccattaccatctattttgtatacaatcttttattgctgacaaattacctttatcaagatgttcatatttacctgatccatcaagtgcattgtacctatacataacatcattaacatcattaacatgatcagcccctaaattatgtccacactcgtgagcaaaagcgttgtttgctaaatcagaaatgattaatgaactaaacccttttccagaataagaattaccatatgtacctacatatgccaaacctaagttactattactccatttatgcccagtgaaaaacgcgcatctaaccactttgaaacctaatttattgggatgctttatattatacgaaaccaaatgttttaactgtttatcggcgtcactaactctagcaaaagaagccaaatattccgccttagcagcaggtgtatcttcaggtttataaaaattgaagttaggaacttgacaatattcttctttttttaaacccaattttctccccacttgcataagagaatacacaagtttaacataatgaaacatgtaagggaaatctttttccatgtaagcaacctcaatattgtatgttttcctggaatccttatttagtataccggttggcttggatgaattgaataattgaggtgatgcaaccggaggtacaatggataaacatcctcctgctattctaccttcaactaattcttttcttcttaatgtagcagtttcattaatcagcctataattatcatacttttcagtaataacttcaaaatggctatcatcctttttgctagtactttgctgatttagataatttttcaataatacctctccgttatgtcctaatttgtttgctgcaactaaaaattctttcttttctgccttatcaaaatttaaatccagctcttcaacccctacatctaagtcctttttccctttgagaaccaattcttctccattatctttaaagtacaattcaaatccattatcacctataatcataatagcattttcatacttttcgttcgcttcaactgtgcctgttaaggtcctttttttgccaaataaagtctgctctgcgcttttcaaatcaaaattcagttttgttccatctttcttaattaaactaaattctcttatttctccagattctcttattggctttgcaaaatcaggtaactgtggtagttctgatattttataagcaacgctgtttgataaatctgactctaatccaacattttctctactacaggaaacaagtgaaaacactataaaaatcccgaaaacaattttcttttccatttctatctaagttttaaatttataaagaataaacttacaaaaaaaccaaagatcaatcacaactttgtaacaatcggcctatactatgtaatgagcattacttttaataacttaactggaattttatgttatttattgatgcattgcataaaagtttatactgcaatttttactaaaattatggttttaaaacctccgaaagatttagcatagttgcttctcattttaaaaaaaaatcaaaatgatcctttaatctttggccaaaaaactttaaaacgactctaagattaatttaatactatcttaagccagcttacaccagtgtttttattgctataaatatctttgtttcatgaaaaaatggacattaaatttatcgcttcgattactcttacttataataagccaggttgtattttcccaaaatccctctgttaaaggaaccgtaactgatggaaagctggccatcgaatttgtcgatgtggttttaaaaaacactgccgattctactaaagttgccggatatgcgattacaaatgcttccggaaatttctctttagatcatgtcgcttcgggtgaatataaaattcagttcaaattaatcggttttaaaaccgttactcaaaaagtaaaatttacaggatctcctatttctattggaaccataactttaaaaacggacactaatctgttaaatactgttgttgtaaattctcataaaaagcagattcaaaaaaccaacgaaggcttcatttttaatgccgtttcgaatcttacacaaacgggcggaaccgctactgatatgctcaaaaacattcctacagtagctgtggatgcagacggaggaattaccttgagaggaaaatcacctatgattttgattaacggaaaaaactccgccattaccaatatggatcagattgcagcaagcagtattgaaagtattgaggttatcagtaatcctactgccaaatacgatgcaaatgcagagagtggtattatcaatatcagactcaaaaaaaacaaccaaagcggtatgaatggtgcagtggttttaggaggtggttttggagccaaaggcagattaaacagctccgtgctcttaaatcataaaacagataaatggaattttggattgggatacgacaaccgctttgccggaagaactaaaaagatcaaaggtgaaagaatcaattatctgattgatgacgaacattatatcaatcaaaatagaaacgaccaacgaacagaaggtttgcagaatttgaaattcaacattgatttttcaccaaacgaaaacaacagcttttcttttgaagctttgggaaatatggaaagtcaggacaatggcgaaactttatacacgcaggtaaacaacagcaccaatcagtttttctcgagcaataaaagacattctctggaactcgaacgctctaaggtaggcgaacttgcttttagctatgaccgaaaatttgccgataaccaaaagagtctgaatgccagtattacctcatctttcaacaaacacagagaaaacactgacattgatacctatcaattcgatcaatacgacaacctgattggtaatgctgcatggcaaagaacacacaattacgaacacgaaaatatctcgaacgctattgtaaattatgcgcttccggtttcagaaagaaccattttagagacgggctacaaaggaaccttccgattcttcaactccgattttgaaagtgccgatcaaacgaatggagaatacgtggtaaatcctttggccagcaacggcttcaaattcaacgagcaaatcaacgcggtttacggaatgttaaactcttatattggcactaaagaaactcccaaatggaaatacaacctgggattacgtgccgaacaggtttcaaacaatggaaaaactcaaaacaacagtgataacttttcaaatcattatgtaaaacttttcccttctgcctctttacaacttaatttagctgcggatgaatttctgaaaatgggttacagcaaacgtatcaatcgtcccgatttagacaacttaaatccttttattgatattaccgatgccttgaatccgcatggaggaaatccgtacttaaaaccggaaatcattcatattattgaaacaggttattccaaagaatggtctaaatattccctttctaccaatgctttttacagaaacgccaccaatacaatcagacaatatgccgaattacaggacaacggagtagttttgcaacagcccagaaatattggaagcaccattacttatggtcttgaaactattttcagcttaaaacccgttggattctacgatgccaatatcagtatcactgcttttcagcaaaatataaacgcctccaatctggctcaggatgtagtcaacaatgcattcagctggtacggaaagatcatcaataattttgttccgtggaaaggtggaaaactgcaaattatcggaaattacaattcggcacttgctaccgcgcagggaaaaagaattccgatctataatgtagatatgggttttcagcaaaaactgggtaaaggcaatgcccgtttaggcttagtggttaccgatatgttcaacacacttgaaagcggttttaaaaacaatacgactttgttcagtaacaaccgtacttcgaagtcagatacacgtgctctgatgcttacttttgcttacacctttaaatctgactttaaagaaaaattactggaaaaccagttttcgacagagtagcatcgcattaaaataaaaatatcattcttgtaatcgggattcctttttctagtgaaaattgaactatattcgccaaaaaatttgtgccccgaattttttgacagctccaagaacccttaaacctacatagaatgaaaaccctgcaagtatttctttttactttattatttagtgccgtaaaattacattctcaaattcacgtagaccgaatcacttataaagtccgtgaccattttattaccaccaccattgggtatccggtacccggaacttttttgccagccggaaaaaaagaaccctctaccattttaaatccggacgggacaggaattattcaatatgaagatctgagcaaaaaaaagatcaactggggaattgaatgtaccgaagaaggtattccggtttttaaagaaggtttcaacagtgcttcctatactttctggtaccgtaccaatgacagtgaggagtggaattatacccaattttccatacattttaccaagaaaaaaatgtttctgatgggtgaaagagtaaaagaatatgtagattataacgtacaataattactacgtaaaaatcaatttttcttgatttttataccttttactacaaaaaagaaaacgttttcgtagattttctaaagtacttataatttttcccataaatttcgataaatataaaaattatacctaatttttatttaatttgcgataaaattcaatatactaacatggtttcaatcacacgcctttttgattttccctattatcaacaagaaacttataaccttcaggttgccttagcaactaaaaaaaacggagtctgggaaaaaacatctagccaggaatatattgcaaaagcaaatgctatttcaagagcattattgcgcatgggtgttcaaaaagatgataaaattgcattaatcacttctaacaatcgtacggagtggaatattatggatattggtatcctgcaaaccggtgctcaaaacgtacctatttacccaactattgccgaagaagattacgaatatatattaaatcatagtggaagtattttctgttttgtatccgatacagaagtacttgacaaagtaaatgcgatcaaagctaacgttccaactttaaaagaagtttattcttttaatgaaattgaaggctgcaaacactggtctgaattgttaacgctaggagaagacgacagcaatcaaagcgaagttgaagccagaaaagacagtattaaagcagaagatttagcaactattatttatacttccggaacaactggaagacctaaaggagttatgctttctcaccataacattgtttctaatgttttagacagcgcaccaagaatcccgtttgatccgggaaaaagttcggctttaagcttccttcctatttgtcatatttttgaaagaatgatactgtacatctatcaatactatggtatttcggtttattttggtgaatcaattgataaaatcagtgataatctaaaagaggtacgaccaaatgtaattacagccgttccaagacttttagagaaagtttacgataaaatctacgcaaaaggtgctgaattaaccggcattaagaaaaaactatttttctgggccattgatttaggactaagatatcagccttatggtgctaatggtgcctggtacgaatttcagttaaaaattgcccgtaaacttattttcagtaaatggaaagaaggtttgggaggaaacttagatttaatggtttcaggaagtgctgctttgcaaccgcgtttagcaagagtttttgctgctgctgaaattccggttatggaaggttacggtttatctgaaacatcaccggtaattgctgtaaacgaccaaagaaacaaaggttttaaaattggaactgttggaaaaccaattcgcaatgtagaagttaaaattgccgaagacggtgaaatcctttgcaaagggccaaacgtaatgttaggttactacaaagatcctgaaaaaacagccgaagcattacaagacggttatttccacaccggcgatattggagaaattgacaacgaaggtttccttaaaattacagatcgtaaaaaagaaatgttcaaaacttcgggaggaaaatacattgctcctcagttgattgaaaacgccatgaaacaatctcgttttatcgagcagatcatggtgattggtgaaggcgaaaaaatgccggcagccttcattcagcctaactttgaatttgtaaaagaatgggctaaaattcacaaaataactttaggaaacagcgacaaagacatcagtactaacgcacaggttatcaaacgtattgacgaagaagtagaaaccattaacgagaaattcggacactgggaaaaaatcaagcgttttgaacttactccggacgtttggtcaattgatggaggacaacttactcctaccctaaaattaaaacgtaaaattattaaagaaatctacaaagatctttacgctaaaatatacggacaaaattaataaaccaacataatactaaccaacgaaaaacggctatctcataaagacagccgttttttaattgtaccaacatcactttaaatagtcaacaacagttgtgaatgctatacaaacggacttacgttttaagcttgtggtcgaattaaaaacccattcatttgggttacttcgcctcttttcgcctctaaaacagccaatccatattcagtaattgtactttcctgtgcttcagcgactgtgtgcctactatgcttttcttctaaaacgatattacaaactttattcataatttttatttttataatttttaaaataatggtgtttaaatctttaactcataattctgttcgctagaaaaacatacttttaatatccctaaagaaatttcttttcttagatttcttttcaggcttctcctttttatcagcactctttttttcaaaaacttctttagctttatccattcttctgatcggttttacttcttcctttttagaattttcgtaaaacttcttgagaggacgcggatgaaaatcaaccaagattgcagccatattgataacatccatactggacggatctgtttctcccttaaagaaggtttcaataggtctgaacttatctttcttctccttaaacttattcttttgagtatgatcgaaatctaagcccaatagattactaaaaacattcaagtcctcttttgttgggttgttttcgaaaatgagccagcacaaatcacgaagctttgcgcgcgaagggttgtacaaataatcaaagtattctccttctctttcgatctcgtatttttttctaattgctcttttgtatttttctaatgtattgttactcataatattttactttatttcggaattttccggaacctcagatatcctcctgatctctcatccatagagcgttaaaatatctttaccgagacaataacgtctgaatgaggtatacctcttgtcttcccttctctttccgtcgtttagtaagctctgaatcgttatcgaaataaacagatactcactaaacctaattttactgacaagaccaaaatcatggtcagatttactttttttactcatggttagaaataattaagttattggcattttttgttggggtgctttctaacttcgaacgttttattccaaaatcagatttccttagtttacacattcttccatctgaagcatggtgaaaaacaataccttcaacatcattttctaacaaaaaatttttcaaatcatcaaattcaaaatttgaaaagtcaaaaacctcactgccgtgttttatcagcaggtgtttttccaatttttcaggatttccctgtactttagggccgcataattcaaatgtcccatcgatcttgatttttaaattatcaaaaccttcaaagaaaaacttatcctcaggtttcaaacggtcacatttcaaccagtgcggatgatgccccgtcacactatcagcttcctgacatgcaatcgcaccagaaggaattatacgcccttttttggtatcaaaccttttaaataattctcccttaataattgctgcagctgagccatcaaattttcttgtggcaataacttctccggttgtaacccatttattttcatcactaaccttatttattacccttgccagatcgtgcggatctttagcaaataatgtacttatctttttcatcttatatacttttaaattaaatccccgatttactcgaagaacatcaaacaacttttgcgcttttaaatttcaacccataaaaaaagcacccgattagaggtgctttataacaaatacgataattatcatattgtctataattgatgcaccagcatgtaaaccccttcaagggccgaactcgcgtttattggttttacgttatatgtgttaaaaatgaaatccattttatatattgtttaatttttaaattctattgttttttgaaattcagtgtcctgatattcttcggcaaagataatgtcaaaaaaatcatacttccaaatccttcaacacttcaattcattgattttcaatttattaaaccttagaattaagtcatagaaatccctgtccgcttatcgaagcagttcttttttcaaatcaaatgactgttactcatcagattacttttcaagactatattttggagtttttataattcattaaacatttaatgtgttgttttttttaatattttatagttacgatcaatttgtaatcattttccatcttttttatcctggtgaataatccctaaaacaaaaaaagcgtcctaaaaagaggacgctttgctatacttatgttgagtttgtaacttcaatttacacttcgatttcataaaaatacagatcacatcctgagcccttaacaggggcaaatcctgctaaacgatcactatatagtcctactgacagattaatatttatatttttcatttccatttcagaagcaaaagtaagtgtttttattaacataatttaacatttgtactttgttagtgctaaaatttttatcgcacgctaacaattttagtctgaatcttcgtttaaaaacccaacaaaacagaatagttttatgcgtaggttttatcaatctgacttaaaatggttgggtcctgtatttcattgtcttttgcaaacattaaaactttagacattacctctgctgattttgggtcatcgtctgcaaacggaaggaacaaacgacctctatgctgcgagtgaattggcaacactgacaaatatttacccggaagctgatgcactaccgcacttcctaaatgtatgctatattctgccatttctccttttactatggcgtgatttccagtgatttctacatttttcactttaaacaaacgcaacgtttctctcaataaaacagctctcatttcgatagaagaatgactggcttcaggatcaacaccacctacgtgtgctacactgaccaccaaatcgatatcacgcattacttcagagaaaatccttggatttacgtcttcaaatgcaatgtttttataatcttttaaagaatgaaattcgatggtttctaaagttgcgccctctacatctgccggcgaaaaccaatcggccatagcatacattttgacctgatagccttctttatgaaaaactttctgcaaaccttcttcataatctactttccatcctctggttttcaataaaactaaggtttgcttaggctgtacctgatgtccggcataacgtctcgaaattgctttttcttttaattcatccggagttggaacatacaattctctgaatacttgtttaaaaggctgttgcaatttgttgtcaaaacaatagctttgataatcaatccaaacgttatttttatgcaaatcataacaatgagcaattctaaaagtctgcttctcatttaatgccataacttctcctaaagctgtaaccagattcccatcaatataaaaacctattttagcatcatttgacacaaaaactaatttttcaagatgtttggaaatgattggatgctcaaaaagattctgcatttcggcaaacaaaaattcatcgccacgaatcatactttcttccagaccttttcttgagcgtgtccattgctcacgcatggtttttctgtaattggttaattccagaattgctttgtcttttttatattttggcggaattgcttttatctctttatctcctttaaaggcaaccaaatctgcttttccttcattattgataactaaacttaccgttacatcgtccaatttaacctctgtttcttttgataaaatgttctgcacctgttttgtttccattgcccaggtcagacgaacagggtccggatagcctgcatttcgggccaaattttcaagtgcaactcttatagccaaaccttcgctggcttgtttcattgaaccaaattctttgctttcctttttaaattgctgcaaatattcataacgtgccagaatatctttttcaggacctgttttgcttaaaggcactaatccgtagactcttaaataatcctgatctcgtttgtcttttactttggctgtaacctccctaattttcaaatctcctgtaatggtatcggcatacaatcgtgcgcgtctgtgtccgtttccgtctgtaacatatttggccgattcgtataaaagttcccatttggctttacccaattgtttgtaagccgatacgaaccaatctttatctaccgcaccatctttaaaatcctgtaaatcaattgaggagaattttgccatttcgctttccagttctgcatttacagcattgtagcttgccgttttggtatgtgcatgaaaccaccagattccttcatcaagacctttccagtccagataattactgattaatttttgccattgcggtgcatatatagccgtttgaatcaatcgttcttctgatattttggcttttttaatagcttcattaaaaacctcctgtgtatctgattctatcggataacatcttttcaacaaataactaaacaatttctgtttggttaaatcggtgtaactccacgaataaatatatcctttgtacaaacttgcttttccgagcgcagtaagcatttcgaccaaacggttgattccaaaaattttctggaaactttgaaccaaatgagttacagcagtgtttgaatctccccttttaacttcgatatccaaaaatgtttcgcgaattttatcaaccattggaactaaaaacggaaattttttaatgagttcttcgcttccaaaatgtctataatgtctggtttcaccagttaaaaccgaaattctttcactttctaagataccttcgtacaattcaccttcggtaattattttttgttcgaaagccacggcatacaaataaattggtggtttatttaaacctatattttgttctaatccgtttaactgtctccacctgtacaggttccaaatcttatcattttgctcctgtgttaaatcatctaaattgattttattcaagtaaatatcaaaaaagttctggttttgccagccgtttccacgatctgaattgtaataatactcgtcttttgcaggtttgtattcaaattccaataccgattttggaagatcagcatacaaagtactacaggcatcaattaagaaatctgttttttctttaaaggagtattttaactgtaaagcattcagaatatttaagattgcattgtcccaatcatagcctcttttcttttggtgcggcaataattctttataataaaaaatgtgtttttcgagaaaatcgcgccatatttttctgtcggagctgcttattaacgtcagtaaaaacaagtctctttcggccagacctgagttttcaaaccagccggaccaaacctcatacaaagggtaatttgttgctgctaattctgaattcttttcgtcttttaaattttttattggtctgaaactattccccaataaaattgtcaatttgctgttatcgtagttttcgacttcatattcgtaatttttgttgtcttcatacaattggtacaacttcgaaatttcggtcttaatgtacgacatagatttagaaaaaccgtattgttctgccttaaccgctttggcatacagggaatctgtctctacttttggcaggccataaggagaaaggacatttggtgtgtaaaaaccatatccgttttcggcacttagaatacttttcttttttgacggttcaagctgttcgataaatttagtttccttctcggtgatttttggtcttgccgaataagctgcaacccaatcgttaactttatctgtcagtttgctattcttctgaagttgcaacataatgtctaaagccgacatacgctgctccatatcacctttttctaaaattttatctacaaaagaagtcactttttgatcttcctgtttcaacaatattgctgttaggttcttctttaaattagaatttttacgtttgtacaattcctgaaaaattgccagttcgtcttctgttaacgtcaaattacttaaagtagagatagccgaagcgaccaaagattctcctctgtcttttaagattctcaatgcaaaacttctttgaaaatctgttggtgcctttttttctttcccgctattgcttttaaaactgtaaaatgaatagcagtaataatcacccagaatctgacgggttaatttctctcttaaattgatagaaaaaccttcaaactgatttaaaataagttctaatctttcgttattgtctcctaccaaattaattgctgcagaatataaagtatctttttcgaattttacatttaaccacgaaaatactttgccttcaaatgttttttcttttacggttatcgtctgcgcaagatggtacactttattaaagaaatcaggataatctgtattcgctgtatagtattgcgacttaacattagcctctaataatgcattcattcttggcactgcaaatgccagtacctgtagattttcgtcgtctaaagctttaaaataaagaggcatttcgatgtaaggatcgcctgtttctcctgcaaattttagcgccagagatttcttctctattgatcctttctctagtaattcttttagatagggaactgttttttcgacatcaaaaacaccctgaacccaaagtgccatataaacctcgttgttattcttgctttgaataccggccggaatcgtttcgggattagagaaataccccgaagcaagattaatgatgtttcgaactgtagtttctttttcagaatcccagcccaagccggtccaggtatctattccgcgaacaacagatgaaaaacgggtgagtttattatcgatgattactttgatcatgtattgcaaagcaccaatactggtttcatccagagcttctaaaacggtctgacgcaatccttcctgacgctgtgccgccaataatagtttttcgaccagttcccaactttcttttttctcactgtttaaaagcgctttgataatattacgggaaacttttcctcttgaatctttgttgaaaatgatatcctcaaaaagctgaaacaggttttctctatccaaatcaatagcagcagaccaaatcgtatactgatttttagaatttgagacttcggtatcaaaacgaatttgttcttcgatactcaaatcataataaacggtatcaccatcctgataactgtagatttgtgaagaatgaagcagagatcgcagaaaatttacccgattaattaataactgttttttattattgggtgctctgaaagaacgtcgggtataaccgtcctgatacattttcattggcagtcggttccacgcttccttaacataaacagtgatttcctttccaaaaaagtaaaccagaagttcgtggtaagtattatcttcccacatatcgtcttttacccacttctcaaacgctgtagcttctttcgaacctaaagaaatataggtcccgtaataattgtctttgagttttaaaagtgccagaccaaactcggctgcttcttttttaagttttgtttttgataataatttagaaaccagattactgtttgctatttcttccagttcttttttgaatcgcttaattggattctcaattatcttacccttgataagatcttctattttcatactgtattattttagattattatattgtaagatgtgaattgtgaattgtgaaaaggtagatgtagaactttatttacttatacttcttacaactaccagtagcttcccgccaggaacgtaagcctgataaaagtgacggatttgtttttggataaatcgatttccccggttaaagtttccatctgatcatcgccatagaaaatggcatataaaccgtcttcaaaagcaacgatggcattttcctgcgctttgaccaaatctactttgttgtggttgtacagtgcgccaaaaccaacttttcccgtatcggttaaaatgggaaggtaattttcttttggaaaatggattttgtcttcgtcctcaaactcaaaggaagaagaatgaaacaactctacctgatgttttacaattagttctaagaaagtacgaacagtaacgattgaagtggtaatatctaaactgatgtttttttcctgaagtataggatgttttttccctaattgtctgactgatatacttatattcattttttaccggcttttattttcaacctgtaaaataagaattttatagcaagatcttcttaaaagaacgtcttttaaatgttaaaaaatcctacgaaaaaaagcagcattagatttcaaaaaaataccctgcaaatcagtatttgcagggtttggattattattggaatgtcgttttcagaaaatcaaaaaaacttaatttgcttttatcacactaattttttccagagtaactttagcgtctccgcctccggtctttttaattataacttgaaaattcgcattcgtattcactaagtcatctgaaatataataggcatatttaagttttactccatcttcaccaatttcatgattctttccaattccgtgatcatgagcaactccaaagaaagtcatcattcccacatactggtctttttttccgggataacgaagataaaccgtataataatcacttggttctttgtaaacagacacatccagattcagaattaatctggaattggcagttctaaaaactttattggtatttcttgcaaaggtactgctcactttatgggtaaaagccgaagtgcctaatactttacctactttctgttcccaaactacttcttctttagcatcctgaaaggagattctggtttttaccttattttcattagccgctaataccggagttttagatccgtaaagcaaatcatcgtatttgtaatctaaattaaaaacgatgttgtagacttcctccatggtataagtgatacggcctccgtctggagtgataaactcatacggccacggattcgcttttaattcttctaaacttggacgctgaccaagttccgaaacatcccacgattcccaaatacgatcgaccatactatgatgcagccaaaaaataggatcgaatccggccgactcaacattggccattaaacccgaagttactatctgatatatttcgttgtaatgctgttcaggcggatgagcatatctcccaccaataagattgtgcatataaccatgaggctgaccttcaagactactactaaatccggcctcacctgcaaaagaagggttttttcttaattcttctattgaatttcgaatactggccaactgctcgggaaggattggttttccattgttcaaaatagtatagcgcgctgcggtatacaaagaacctgatggctccctaaaaggttcggccataatattctgagattcttctttactgccgtagttccagtacggaagtgcaaaatctgcttttccggacaattctctaacaattttttctaaataccagatgtacattctgtgccataaaagaaaatttaaagctgcattattagtgtcagtgtgtgtacaatctgcccaggcccataatttatcatcaatagtctgatattgcggacagagcttattgggacctgttatcttttcggggatattatgaattgcgccttggtaataccaggaaatacctttctcacagcccgcttcgcgcattttcttaaaagccactttcatcgcctcaagattggctttcccctgaggcgtattggcattccagcgaatatacttcgcatccgctttactctgaccataggacaatcccgagatcagaataactaaaaataagttagtaatttttttcattttttttgtttttgggttattaataaattggtagttaacattaaagcacttcgacttcaaaagttaaaatctgagcatacttaggatttgctttgtcatagattttaaatttcaccgttccgttgcctattttgctggcaggaattacatggatggcaataaagccctgctgatccggattaagtttattaaaagaggatcctttcggaattccaatctggcaggcaccgtgctggcacatcgagcaatcccactcctttgggaatgtattcgatacagtctcccaaaccagatagattggtttatttgaaatattttcgaccttgattttcgaaatgtcaagccgtttgtttttcagtacactttctttattgaccgcagttcctactaccgaaaatgtaggtttgttttgcgcaaatgaaatagaaaccgaaaaaaggagtatccaataaaagtacagttgtttcatagccgtggggttaaattttaattaaaaacagcaatagccgtttcgtaaactttcttttttgaaataggattagtaaaatggtacatcagttgttctgtatctcccacattttccagggaaacgagtatttccatactttctcccgcatgtagtgccgctgtgcatccgttagctgattctgttagagcggtctcactcccaaacctcagctttaattttgcgttaggcggaaatacaatttcatgaaaatacaatcccgaattgaccaatcgaagcagcaccgcctcgtttttacgatctaacgattgcaaaccattggtttcggaagcaactttaccattaatcaaaaaataattgggttggtagggaggcagaacaataggtttatttcgagaatcgtattcggtacccatgatggcatcggtgtgccattttgtatccagttcgttgctgcaccaaagaatttcacgcaagggctcaggcgtctcagaatccttttcttttggttcaataataataagaccaaacattcccgcctgaaggttgaacggataattttcgggactgtaatacaaataggtacccggtttttcggcccaaaaagaataaaacccatgctccatgtgatgaatggcctcttttttcttcatcaccttattgtttttatcccattgaacaaaatcaatttctttgcaaaataaagagaccggatttccctgcgaaatgctccaaaaatcaacccgaacagtatcgccaacctttgcccttatctcagatcccggcaaagtaacctgccccgaaagagagttcgtaaaaccaaaagtccggacagagacgttatttttaagcagtagttttcctgttgttctcccgatcactaaatgttcgttttgagaaaacaaaaacagattgcttagtaaaaagcaaaagagcactatggatttggggcatcctttcatttcttaacttaaatctttcactgccaacacattcggcaatgcaattcaaatttaaaattaatgccggttttgagaccccgtagaaatacctgattttgtagtaaaaatctgccttgagttttgttttttaagaatataattcttctttgatgcgaatcgggttttgaaggatcaggggaggtagaattgtggtgtgaggtagaaaacggtgtcgataaagaatagattcccttgaaacgtcaaaacattttcatcatgtaaatcttcgagaataatacccaattcgggattaaaataatcattatttctagtgctaacaaaaccatttgaagtcaaaaaaacttttacattttctaattctgtatcactatcagaatctacgaatctttgctctacaactgcatacaatatagtatcctgttccgaaaatccaattaattgatatgctgtgtcagaaaaaaaataattatgcagcagtaaattattcaaataatcttcccatgtttcataatagatactgtcattcaatttgatcactttatgcttattttgaagatacactttttgctcagcgcccgaagatatgaaagcattgatgttaattccggtaatccagaaagaattcctttcgcagaattcttttattaacgctgtttcttcacttttgatttgcttgccagacttaagcgttctgcctgtgctcgtgccttttctaaggtaacgggagactgtttggatagtatctccatgcctaacttggccctttcctgaaatgatattttgtagttcatttttcatgaagtttatcatgcaaatataaatattttaaacttactatttacctgacgaaataaagccttgtaaaagtaagaaaaagaatatatttataacggataaaaaaacacccggtagtacattaccaaattagccttgtattttacggatcgctgtttttatcaaaaaaaataaatatctttgaattatgagcacagcaaccagacccagaaatattggccgaaatatcagccgtatcagagaacttcgcggaatgaaacaaggagcacttgcagatgccattggcacaagccagcaaactatttcaagtattgaaaccagcgaaactgttgatttcgaaaaattggtacaaattgcaaaagcacttggcgtaacagtagaagcgattgaaaattttacagaggaatctgtttttaatttctttaataatttttacgataatagttcaagtcaaggaaatagctttaatcaaggtatgaatgctacttttaaccctcttgataaagtgatcgagctttacgaacgtttggttcaggctgaaaaagataaggtcgaatacttagaaaagttgatgaaattgaaataagagattttctttttatataaaattgaaaagcgcaaacttttgagggtttgcgcttttttgggttttgctattactgctatttactttattatctaaaatattttattcatttgaaaatatttgcttatgattgtcgctacgaagtcgggagacttcgcagagcggggtaagctctaggtacgagatgccccttttttaaatttacttagatcaatagatccaactattttaggtttcggtaattgaggaaactcactttttaaagtttcagtttcaatactaacatttaattctatcatactacctgcaattttatcagtcaaaacagaatttttatgaacttcattattatttatactttcctccaaaatttcagttttatctttatcaatttttcgtacgagccaagcctgtaagccatcatatctaaaactaatataaaacttgacttttgaagtttcgtctttccctttttcaaattttcctactactggcacaaagaaagcttctaatccacatttaagtttaattttccctttttgtctatcatctatagtagttataataccttcaacttcctgaagctttgaatcatcttcaaatagttttagcccttcatttttcattgaacctaattctacataacttaatattttcttagaaccagttcccactccataccattcaaaattaaacttatcattagttgtaatttctttgcattcttttatgtaatcttttgttttatttaatagtatatcattaaatgaatcacctccttcaatcaattgtattgcgttaaaaacataattataataagttgcttctaaatgagatactctattttgtccactgttattataccaaattttaatcttatttattacatcttctaaactcacataagtagaattatatctgacacattgcaaccaaaatttataattactcgaaacctcaggttgatcatgtatattactttctattacttttaaaatgtctttgcgctcataatcattaatcatagcccaagcaattttaatttttttcacatccccactaaccttgttagctaaagttgaaagtacaaacatctttctaaaataaggcctactgctattatgtgctgtttcagacatatttttgtatttactaatagacttcgtaatatcacctaataatttaaaagtttttgcttctccatcttcaatcatatttctagctttattcatatgttttgcattatccatatctgtagatttatagaaacttatgaagcgatttccatacgtttcaatagatttttattcaaagtatgttttgcataatctttatcgatacttaaaactttatcgtctgaacttggcaattcgtacatggcatcggttaagattgcttcgcataacgaacgcaatccacgtgctcctaatttgtactctaatgctttgtctacaataaaatctaatgcctcatctgtaatggtgaattcaacttcatccattaagaataatttttggtattgttttaccaaagcatttttaggctgtgtcaaaattgcacgcagggtttctttgtctaaaggatccatgtgcgttaaaaccggtaaacgtccaataatttcaggaatcaaaccgaaatctttaatatcttttggaataatgtattgcaataaattgtctttatcgatattgtctacatttttagaagtcgaatatccaacagcctgacggttcaaacgtttagaaatgatacgctcaacgccatcaaaagcacctcctgcaataaacaggatgttttgcgtatttacttccacaaatttctggtccgggtgtttacgtcctccttttggcggcacgtttacgacggttccttcaagcagtttcaataaagcctgttgtactccttcaccggaaacgtcacgggtaatagacggattatcactcttacgggcaattttatcaatctcgtcaataaaaacgattcctctttcggctttggttacatcataatcggcagcttgcagcaaacgtgttaaaatactttcaacatcttctcctacataacctgcctcggtaagtacggtcgcatcaacgatagccaaaggaacgtctaacattttagcaattgtttttgctaccagtgtttttcctgttccggtttgccccaccataatgatgttacttttttcaatctcaacttcatcgtctaattgctgttgcattaaacgtttgtagtgattgtaaacagcaaccgacattacttttttcgtctgatcctggccaataacatattgatctaagaaagctctgatttcttttggtttctttaaaattaaatccccaacaagttttgcgcttccacttgattttaattcttctaatacaattccatgtgcctgctcgatacacttatcacagatatgtgcattgatacctgcaatcaataaattagtttctggcttttttcttccacaaaacgaacattctaatactacttttgccattctttatttaagttactaagctgcaaagatactaagttttaaagtttttcaactaaaactttaaaacttaactctttacagtttaagagcctgtttaaattttaaacaggctctaatatttttattttttttatttaaaattttaaatcacaaagaacacttagaatcttagcgtcttagcaacttagaagctttaaaaaaaattagcttcttcttaatacttcatcaatcattccgtattcttttgcttcatctgcaatcatccagtaatcacgctcactgtctttgtgtactttatcaaaagtttgtcctgaatgttgagaaataatatgatacaattcatctttcaatttcaacatttcacgtaagttgatttccatatctgttgcaactccctgagctcctccagatggctggtgaatcattactcttgaatgtggtaaagccgaacgttttcccgctgctcctgcacataatagtactgctcccatagaggctgccataccggtacaaattgtcgctacatccggtttgatatattgcatggtatcataaattcctaatcctgcataaacacttcctccaggagaattcagataaatctgaatgtcttttgaagcatcagcactttctaaaaataataactgtgcctgaacaatgttcgcgatctggtcgtcgatacctgttcctaaaaagataattctgtccatcattaatctggaaaaaacatctaattgagaaatattcaactgacgttcttcaataatatatggagtcatattggttgggttcattgccgctataattttgtcatagtacatggcatttactccctggtgctttgtagcaaattttttgaattctttaccgtagttcatattttttcttagtttaaagtttgaaagtctaaagtctgaaagtgacttaaaacaaaagacaaacttcatacctttttagaaaggatgtcaatttgtcttattttataatttatttcacgtttcaagttctaacattacgtaataaaacttgaaacctgaaacctgaaacaaaaaataagcgtcaatagaaaaaacttccattgacgctcaaatataactattttttattagttcatgtttgtaataaattcataaagtttgaaagactttacaacttttgactttatgacattacagactaaaaaattattctccgtatgaagcggcaataaattcttcgtaagttacttcttttgtagttggatttgctttttctttaaagatttccaataacttctcagctactacctgctcagaaagtcttttcacttcttcctggtttgataaaactcttgctacaattgtctgaacttcttcgtcagaaggatttaactgtccaaattgagccatttgttgtttgattgcatttgttgtaaaagctttcaaatcttcaaaattaatctggatattactttgtgctaaagcttttccttcgattaattgaaaacgtaatcctttttcagatcttgcatattcaatttcagcttcttctgcagaaagttttttctctccaacagtttgcaaccattttttaaggaattcagccggtaaatcaaattttgtactttcgatcaagaagtcctgaacgtctaacaataatttttgatctgcttgctgagcgaattgagcttcagcatcttctttaattttagatttcaaatcttctaaagaagctacttttccttcaccaaaaagtttatcgaataactcctggttcaattcagccaattcagctccgttgatagcctcgatagtaaagtttacttcgatatctaaaccgtgaacattatcatgacctacttttaggtagtccattaattggtgatcgtcttcaaataaaccttttgtgcttactgttacaacatcacccacttttttaccgatgaatttatctccggcagctttgttgaaagtagctacagcgattgtagttgtattgttgattccgttttcttcgttagcgaaagttcctgtcaaatcagaatcagctactaccacttcttgtggaattgcttttccaaattgtttttggatacgctctacctgaccgtcgattaatttatcatcagcagtcacgatgtattttacgatattgtttttagcttctaaatcaatttcgaagtttggcactaaaccaatttcgtactcgaatgttaattcttcagcatcccagtcaaagttttcgtttactttagctagcggagttcctaaaagatttaatctttcagattgaacaaaacgctctaaagccaaatcaactacttttttaacttcttcctgcttaattgcttttccgtattgtttttcaaccaggtctttaggaacctgtccttttctgaaaccttttacagtagccaacggcattttttcgtttattctttttgctacctgacctttataatccatgtgaacaactgtcattacaatagtttcattcacagcgtctattgctactcttttaatatccattttcttctttgatttacataataaaattgggtcgcaaaattataaaatttttgcaacccaaccaagtttttaatctattgtattagaatacgttttaatcgcgctttctctatttgttttatttgtcgtctcctataatcttataggtgatcgattgaaggatagacaagataacactaaaaaacaaggctgtccagaacgaatcgacggcaaagcctccgacaatatttgtacagaacaaaataataattgcattaattactaacagaaataaacctaaagtaataagtgtaaccggtaaagtcaaaactactaatattggttttataaaaatatttaacaaccctaaaactaccgcaacaattaccgcggtggtaaaactggcaacatgaacaccaggtaaaaagtgggcaattaacaaaactaaacctgccgtaacaagaagtctgagtagtaaattcataatggtatggttttaaaaatttatttaaaagtactaaaatttaataatataaacctttgctcaaaattgcattgattgcttttttttcgtgctccagtaatttctttttttcactatcggaaatatcatgtgttactccgacatattcaatctgatcaaatcctaaaatttcatcaaaaataagtttcactctttcaacatgataatcagacgtaatgaccacaaccgaatttaagttgtgattgagcactatcttttttgatacaaccgcatcttcgacggtattggcagacaaggcacactccagaaaattttcagcactaagtcctttctcttttaaatatttcacagcataattggcatgtggaagcggcgctgtattaaagtgctctccaaaacctcctgtacaaataatgcaattgtcctttgattcaaaaatatccaaacaatactttaacctgtccagagctacctgccccaaatctcctgtttctgaatttggagatcccaaaactattaaaactttcatcttttaaactaaatagaactagtccttttaaatcaaaacttactcttttaaaaatcctgctgtcagttcaaaaaacatttttggattttcggcgtgaagccagtgtcctgcattgggaatggtttcgaattttgctttaggaaaatgtttgcgtattgcttcaaaatctgcatctaaaatatagccggaatcccctcctcttataaacaaggtctctttatcgaaaactaaatcatcggccagcgcttttccgatagcatccagattatcattaaaaactgccagattgaatctgaaagccagctgtcccggttccttccaatataaattctttaataaaaattgtcgtgtaccaaaatcgggaacgtattgcgccacaattgcttcaacatcatttcgacttggttttaccgaaaaatcaacggcatttaatcctgccaaaatatcctgatggtgctgtttgtaaaatcgagggccaatatcggctacaattaatttatcgactatttcaggatgtgtagtagcgaaaagcatggccactttccctcccattgaatgtcctaacagctctattttatttaactgattggcctgacaatattcaaacacgtcttgtaccatcgcctcatacgaccattcgtctgaatgaaaactacggccgtgatttctcaaatccagaagatgaacctgaaaccccgcgtcgacatattgacctgcaagtgttttccagttgtctgacattcctaaaaatccgtgcatgattacgaaaggttttccttctccttctattttcgaatataacatttgtattgggttttaaaaactatccgcaaaggtaaaaaaagttatgcaccaattcttaaactaattaacctcgacaaagctcctttatttaaaaaaacttagcgcctttacggctttccgtaaagaaagcacagatacaaaccgtaacttgcgcctttaaaaatcaaaataaaattttatttaatttaaacctcaaccatgattaaaaaattatttttagtatccttagttgcttctcaacttatggtttcctgttctagtgacgacagcaaagaagaaactccaacagaacaaactcgtgatgaacaaattgcagctattctaaaacaaccttattctaaattaactcctgctgatcaaaaaataaaattagaggcagaagctaatgaaatgttcgttcaattagacaaatctaaaagttctggtgctattgaagcaacacaaaacttaaacagattattagagattagtgaagttgacgttactaacggaaaaaacagcaataaaatagaagacattttaaacgtttccggagtttacggtatttacacttgggacaataccgcaaaaacctgggtaaaaacagcttctacaacagaactgaaattcgttttcccggctaaaaaaacacaaacaacaaacaatgcaattctttctgtaaaagctgttgcttctgatgtaaaagtaaaaagtatcgacacttacggaaaatggacttatgatgctgtaaaacaacaatatatccaaagcccatctgtgtatgattatttctttttaccaacatctacagatgctatcttgaccatcgacaatacaacagcggcgacttttacccaaactgccaaatattcttcaaaaaaccaatctcctgatgagtttacttataaaatggttttaaatgatggttatacttgggaaatgaatggtaaaaaaggaactgaaaacacttcaaaagccctttttacctacaacggaaaaactttacttgacttcagcgcaggaagctctgctaatattgatgctcttatcaatgatgataaacttgttcaatacagaggcaaagcaaacggactgattaaactaatggacaattttattatcgttgctgaaactgatttagctactgaagctgctgatgacgcggcattagagaaaagtatatcataccctgcttacccagactcatacaacgctaaagctaactataaagaatattacactgcagtaaatgcatataacaaaaaatattctgaaggcacagctactattttcaacaaaaacataaaattagtcttagtttctaagaaagacggaactaaaattgcagatattgttctgcgttccgaaaaatcagactatgattacactaccactttacctgtttgggataccaaaaattcttactggtcacacaatggtacgggagaatcatttacaagagcttactatgaagaagaatattatttaaaattcaatgataatactgaagtttctttcagcacttacttctctgtaggattcgaaaaacttgatgccaagtttcaagatttcatcaaagcttttgagagaaaataaacctcttaaaatataaacttaaagccgttttgaaaatagtttaaaaacggctttattttttccgcggtctttacaacaacggtactttgaccatagcctgcccagattcctattccgcctttaatatttgattttaaacttgtgtttgccggataaataggatttctgctgtttacgatttcgttttgccagctgttccaaaaatctaaagcttctttattttgagttcttaattttaccagtattaaatctccatctgcaaaataaggggtgaacttagttttaggaaaaagtaaaatgcctctgttaatttgaacggatacggcggctgtagtaaaatttttatcgtctaaattgccataaaacgcaggaacaaaaacaggctcctgtccttctattctggttgcaatctgataatagtttttttcgtttaccggatcatcaaatttcacaaaaacataaccggtcgtatcggtgtcagccttctttatgtacactgcactttttatggctaccgatcttggaattttggttgtcgcttccaccacgcggtttaaatactctattttcaaaaaatattctttccctgcttctcctttgagaaccgaaccataatacacaaacggaggcactctgtttttatcattcttaacccttaaaacctctgaggtcataccatctgaaattgtaatttttgcagaacgtataacatgatttaacacattagtcgaatctattgtattggtaaccggaatactgctcgatagcaaaacctgagcgtaatcgccttcttcaatccagccttctactacaattttagattctgtccctagctgaccaaaatcatctttggaacagcttgtcactatcagaacagcaatcagcaataaatattttttcatcttttttttaaaatttaaacctccagcttacggaaggcaatatgcgatacaaaaccttttcttcctgttttacaattacactgtttttgtccttattctcttttacactcaatactacataaaccggattcttgatattgaacgtgttgtaaatcgagaaattcagtgcactttcttttttattcgttttcacaaagaaataattcaccgaaagatcggttcggatataattaggcatttgtgcattgttataacctgaatactctttaaccggattattattgatgaaataccaggatgttggcatagtgaagcgattcccggaaccaaacagttgtgtaactccgaaattccatttggcattcagatcgtacatcccaacaatcgacagattatgacgtctgtcgtacttggcaaaatacgtttttccattattaagctcctcaaaattacgatctgaccagcttagtgtataactcagccaacctgtaaactttccattgctcttacgaagcatcacttctaatccgtatgcttttccttttcctgtcaacaagtcgtttttgaatgtggtaacctcattaaactgtgtgattccgtacggatattcaagcagatttttcatcgaacgataaaaacctcccaaagaagtactgaaatttttcgaaatattctgattagaaccaatcgaaaactcgtctgacgattgcggttttatgccgtctgaactggcaatccaaaaatcagtaggaattccaacacttgaagtagttatcagacttaggtattgatattgtctgttataagatccataaaaagaatatttttcgtttaacagataattcaataaaactctgggctgaaaatgcaaataagaatcacgggatcctgaagtataataattaaccctaacacctaattcggcgcttaaacgatctgtaaatcttggctttacagtcgtaaaaacagccgcctcattggcattaattgtgctattttgaaaagtattgctagcatctgtcaaattctcgacattcactttttgaggctgcaaattatgatgtacgtattgtattcccgattctacaggaacattttctatctgatatttaagagcattattaaatccaaaatcttttacatacgacgaaactccaaattcaattgttgcctgttccatattcagttcattagaatattgactaaaatatagcgcatttgacatgctaacatttggagaaattgcagtaaccaaagttggagaaatggtgacgttactccactttaagctagtattcaaagcaagatttccgtcctcgatcttcaactcatcaccactaacaaaagcatcaacagaaagcagattatttttagaaagctgagaaataaaagtcaaatttccatctgagaagccatatttcatattctgaacatcattgttttttgaaccggaacgcaataatggcgcaacaatttcatcaatatatgttttccttcctgaaatgtacaaacctgagtttttaccaacaggagcggccaatgtaagctgcgaagctaaaattccaacatttccctggatccctaattctgaaggtatttttttattcggtatcaagagtgtagttgaactcaaacgtcctccatattttgcattcgaacttgatttatcaaactcgacacctttaatatgatcggtattgtaaaaagggaaaattcccagcaagtgcgacattccatatacaggagttccatcgtacaaaatggcattgtgtcccggatctccacctctaacatacaaatatccgtttgcatctcctgaattttgcactcctggtgtcagctgcaaaagttttataatatcagtagttcctaaaacggtcggaactgaagacaattcttttaaattaaaggctaatttcccccctgctaaagtcgttattgggctttttttatcattgtttactataacttctttcagatgggaaacatctttgtccggcactatcaaaagcaccgtatctttttcgaggttaagattaatgattttcgtaagataacccaattggttgattgctatttctacatgtcccggcggcagctgttgcgagaaattaccaatagagtcagacaacgtataatattgttggatcgctgtttttagagaaatacttgctccaacaagattctcgtgttcagaagattttagatttccacttatactgactttagattgtgcaaatacattggaaaaacagaataaaaaaaggaggataattggttttggcacttgattttaataagaaaagtgcgaaaataagcaattataaagtgttttctaagagtaattatggttttatttttatacgcttaactttcagaatctaactgaaatcgctgaatatcattctctatcaacgcttttaattcctcttcttttggcatgtatagtaaatactggcttgcaaaaacacttttcttatctgctaaaacagaatatttcactatcgtttcatctttttccgaacacaatagaattccaatcgtaggctgatctgattcgctcttctttaaatcatcatacattcggacatacatatcaatctgaccaatatcctgatgagatagtaatccggtttttaaatctataattacaaaacattttaaaatgtaattataaaaaaccaaatcaatataaaaatcagacgtatccgtaacaatatgctgttgtctccctacaaatgcaaacccttttccaaactccaataaaaattgctgtaaatgatctattatagatgtttctaagcttcgctcagaatttttagcttcagctgacaatcctaagaattcaaaaatataagggtcttttattaaattttgaatagtatctgattctgctttgatacttttgtgctccacaacacgttcaaatgctaatgaatttatttgcctttgaagcgtcctgctgttccagttgttctgaatactttcgttcagataataatttattttttcctccgaaaccaatcgcgacagtagtctataatgtgtccaactcaattcgtgacgcaatgcgtcacgaattggaaaaactttgtaaaaagcgcgcatatttctcagattactatcatcaaacccttttccaaactcaagtgtaagctgattagcaagattcattaaagtagctttaccataatcagcgcgatctttccctctttgttcgtcttcaacaattactctcccaatttcccaataggtttccaacaaaatagaatttgccattctaaagactcgtttacgagactggagaataatttcttttacttctgaaaacaacggggtctgattcgtgatcattatccaaatatttaagtcatctaaaccttaaaacttacttcaatttattcagatacatgtttactacgttatccaagcccagataaagagcttctgaaatcaaagcatgaccaatagacacttctaacaatcccgggatattttgtttgaagaactgaatattatccaaacttaaatcgtgacctgcattaatccctaaatccaattcattagccagttttgccgcttcaacataaggatcaattccgtttttattccctaaaccgtattgatgtgcaaaagcttccgtgtacaactcaatacgatctgttcctgttttttttgctccttctataacttccagcaccggatcgacaaaaattgaagttctgattccgtttcgttgaaattcctgaataacttccgtcagatacgattgattggctacagtatcccaacctgcagacgaggtaatcgctccaattgcatcaggaaccagagtcacctgtgttggcttacattctaaaaccaaatcgataaagttatgctgaggatttccttcaatattatattcggtatatacaattgcttttaaatcgcgggcatcctgatagcgaatatgacgctcgtccggacgcggatgaattgtgattccctggcttccgaaattctgaatatctgtcgcaacttttaataaatcaggaacatttccgccgcgtgcatttcgcaacgttgcaattttattgatatttacacttaactttgtcatataaatagataattaattctggtaacactatatttgttacgacaaaaatacaaagtaaaacgtagcgttttttgctattttttgattattttgcatgaaatatcttcaatagatttatgacagaaattacaaactatatcaccaatgatttcagagcgattgatagtcaggaaacgatagcatcggttcaggacttttttgctgatttgagtttttcgcattttccggttttggaaaacggaatttttattggaagtatcgccgccgatgatgtcgaaacttttgatacagacaaaaaagccattgactacaaatataccctggaacgtttttttgcccgaaaatctatgatttggctcgacgttctggaagtatttgctaaaaatcacaccaatacaatcccggttcttgacgaaaacaatgcctatattggttattatgaaatggaggacatcatgaagttttttcaggaaactccttttttaaaagagcaaggcggcattataatcgttcaaaaaggacttttagattactctatggggcaggtcactcaaattatagaaagcaataatggcaaaatcctaggctgttttgtctctgaagctgacttagaaaatgttcagatcaccgtaaaaattggtgtaggccccatgaatgaaatcatccagacttttagacgatacaattacgaaatcatatccgaacatcaggaagacgcttatatcaacagcttaaaagaacgttctgattacctggacaaataccttaacatataaattattaatgtgtcaataagcaaattagttaattagataatcttcgcattgacaaattatctgattaacacattgacaaattatctaattaacgaatgaaagtagccatttacgggcagtattaccaaaacagtacaggccccattattaaagacatttttatttttttcaattccaataatgtcgaaatggtaattgaagaagactttctgaaaatgctctacgaaaaagaactcgttaaaaaggaatacaagaccttttcttcttctacttcgttagacgatagttacgaaatgctcattagtattggtggtgacggaactattttaagagccgcaactctggttcgcaactcaggaattccaatattaggcatcaacgccggaagattagggtttctggcaacagttcccagagaaagtattgataattttttacaatacatcattgacaaaaattacaccatctccgaaagaactttattaagcttaacctgtgatcctaaaaatgacaccatcgaagacgatttaaactttgcaatgaacgaagtcactgttagccgaaaagacaccacgtctatgattacagttgaaacgtatctaaacaatgaatatttaaattcatactgggcagatggcctaatcatttcaacgccaactggctcaacagggtattccttaagctgcggcggtcctattctgaccccaaatgttgaaagcttggtaattactcctattgcaccgcacaatttaaacgctagaccattggttatcccggacaataccgaaatcaaacttcgcgttaccggaagagaagaccagtatttagtttctttagattcccgaatcacctctgtaaaaaatgattctgttctaaaaattaaaaaaaccgatttcaaaataaaaatggtggaaataccgggcgaaactttcctgaaaacactgagaaaaaaactgctctggggagaagacaagagaaattaagcggttttctgaattaccactatacgataatactacattttcccgttctgcatatagcgaatcatcaccaaatagctcaaaatcatattgtaaattgaaaaaaaagcacatttagctaaacaaactttgattcgaatcgataattattatatttgcacgcaattttgaattaaatgaagaaaatttttaatttattgttatgtttattcccctttatcacactaaatgctcaaattaatgagattggtgtttttttaggtggaagtaactttgtaggagatgtaggcaaaactacctatgttgcaccggaaaaactggcttttggtgtattgtacaaatggaacaaaagtccgcgtcactcctatcgattctcgtatacacaatcaaccgttacaggaaacgatttcgattcatctgaaacaggaagaaacagaagaggctatagctttaaaaataatgtaaaagaactttcggctggtctggaattcaattttttcgacttcaatctgcatgattatcacagaaaagtaactccgtatattttctctggacttaacttttttatgtacgacaaattgtatcgctttacatcaagtccaaccgtaacacaatccataagttcaagttcgtttgccatacctattatattaggtataaaatcaaacataacaccaagtattgttctgggagctgaagttggagcacgatatacttttacagatgctatggactccagcaatccaaatacaaaaaacacaaacatattacagtttggaaatttaaataataatgattggtatgtcttctctggtattactttaacgtatacctttggagaaaaaccttgctattgcgcagaataataaaaatgaatttactagaatcaatagataaaacaaatttacctcaacatctggccattattatggacgggaatggccgttgggcaaaacaacaaggttttttaagagcatttggtcacgaaaacggaacaaaatctgtaaaaaacaccataaaaacatgtgccaaacttggtattgaatacctgacgctatatgctttttcgacagaaaactggaatcgtccgaaactggaagtcgaagcacttatgaaaattttaatcaattccttaaaaaaagaacttgggaccctacaggaaaacaacatcaaacttaatgctatagggaaccttgaaaaattaccaaaatcagctcaaaaagagttgttggatgtaatagaaaagaccaaaaataacacccgtttgaccttaactttagcattaagttacggatcaagagaagaattggtacaagccgttagaatcatcagtgataaagttaaaaataatataatttcaatagactctattgacgattcaattataaatgagcatctttacacgcaaaatttacctgacgtagatttattaataagaacaagtggagagcatagaataagtaattttttgctatggcaaatcgcctatgcagaactatattttactaatgtcttatggccagactttaaagaccaagatttatatgaggctattattagttatcaaaaaagagaacgtagatttggaaaaaccagtgaacaaattaaataattttttagtgttgcaaaaaagaatacaaatagtctttaccctacttcttttgggtagtttttcacaaattaaagcgcaggaaagagttccttttgatcaggggaaaaaatatattcttgccaaagtttctgttgttggtaaaataagctttaacgaacaaacagttgttacattttcaggtcttcaaaaaggacaggaaattgccgttccgggtgaagaaattagtggtgctattaaaaaattaggcaaacttggcctttttgacgaaatctctttttatgttaacaaaatcgacaacgacagtatctatttggatctgaacattgtcgaactccctaaattaaacgaagttaaattcgttgggatcaaaaaaaataaaatcgaaggcttaattaaggacaataatctgaccaaaaacaaaattgtcaacgaaaacttaatcacgacaactaaaaattatattgaaaataaatataaaaaagaagggttctacaacactaaagttactattaccaatactcctgatagtactgcaggtaatcatgtaaacatgcttgtacgggtagataaaggagataaggtcaagattagcagtatcgatttcatcggaaacaaacagcttagcggaaatcagttgcgagctgctatgaaagataccaaacaaaagaacatactccgtatcttaaaatcttctaaattcatccctgaaaaatacaaaactgacttagaaaaagtcgttgccgcttataaagaaaagggatatcgtgatgcccgtattatttctgattctgttaaatacgacaagaagaaaaatatgctggccatcaaaattaatgtggaagaaggaaacaaatactacttcggaaatattaaattcttaggaaatacagtctattcagatcaattattaaaccgttatttaggaatcaaaaaaggcgaaacttacaacggtgttttactggaaaaacgtattgccgacaagacaaaacctgatgctgaagacatcacaaacttataccaaaacaacggttatttattctctaacattaatgctgtagaggtaaaaacagtaaacgacaccatcgattttgagatcagagttacagaaggtccaatcgcatacttcaacaaaatatcggttgtaggaaatgataaaacaaacgaccacgttatttatcgtgaattaagaactaaaccgggagaaaaatacagtaaagaacagttagttcgaacaattcgtgaaattggacaattaggattctttgatcctgaagccattgatccaaaattcaaaaatgttgatgctgcagcaggaactgtagacattgaataccatgttgtagaaaaaggatccagccaggtagaacttcagggaggttacggtggtggaggtttcattggaacccttggattatcatttaacaacttctcagcaagaaacctgtttaataaagaatcttacaaaccattaccaatgggtgacggtcaaaaagtagcacttcgtttacagggaagtacttatttccaaacctatagtgtgtcattttcagaaccatggtttggaggaaagaaaccggtacaatttagttcttctatttcatacagtaagcaattcctaaacaatttcgctaccagaaatgttgacaaaagcaaaagtttcaacatcttgaccttgcaggttggtttagctaaaagacttactgtgccggacgattacttcgtattatcacagtctgtaagttaccaacattatgatttgaacaattataacacaggattgtttacctttggtaacggagcatcaagaaacttagcgtatactattggactttcaagaagcaataaaggggttaacccaatatttccaacctatggttcagactttagtatttctgcaaaagtaactcctccctattcattgtttaacggaattaattacggtgatctaaaaaatcaaaaagaatataaaacacaatacacaggagatccaagatctggtgcagatggcaagccgatgaataccggagattataccaaaacggaaatcataaacggacaagcaggagttgtaagtgttggttctgattacgcaagtgcagatgttgaccaggggaaagtggatcaaaaaagatataattggctggaatattataaaattaaattcaaaggagagtggtttaccaaactttatggtaaattagtaatgcgaactttaacagagtttggattccttggagcatacaaccaggaaagaggagtggtaccatttgagcgtttctatttaggtggagacggaatggcaaactactcgatggatggtagagaaacggtacagttgagaggttatgaaaacaactctttaactccggtaaatgcaaatggagaacagattggagccacaatctataacaaattctctatggagttacgttatccgattacattaaaagcttctgcatcgatttatgcattggcgtttttagaagctggttcatcatacccaacttttaaagcttataacccatttgatttgaaccgttctgcgggtgttggtctacgtgtattcatgccggcatttggattattgggtattgactggggttacggtttcgatcctcaaccaggagaaactaaggcacatggtaaagagattcactttatcatcgggcaacaattctaaaaaaacaatagttggttaaaaattttcaaataaagtaatgttatgagaagacaatttttatttatatttttagccctgattgtagcaaatacaagtcaggctcaaacaagaacgacaaggattggctacatcgatatggagtatattttggaaaatgtttccgattacaaagaagctaaggctcaattagagttaaaggcccaaaagtggaaacaggaaatagagaccaaaaaactggacatcaataatcttaaagaaagccttaaagccgaaagagctttactgacaaaagagcttattgatgagaaagaaaccgagattaaatttctcgaaactgaaatgatggattatcaacaaaagcaatttggtgttgacggaaatctgatgcatcagaaagcaggtttggcaaagccaatacaagaccaggtttttactgcagttcaggatattgctgaagcaaaaaattacgactttgtctttgacaaatcatctgatttaacaatgctttttagtaataagaaatttgacatcagcgatcaggtaatccgtattttaaaccgtacggacaaacgtgagcagctgactaaaaaacaattaaaagatcaggaagccaaagaaaaactggaaaatgcaattgatgaaaatccagcaatggcggaccgacaaaaagctcttgatgacaaaaaagcagccagagcaaaactaattgaagacagaagacttgagcaggaagccaagaaaaaagaatacgaagacagaagaaaagcattagccgccgaaagggatgctaaaaaaaatggcacggtttctgaacctgccaaaacagagcctgctaaaacggatggcacaacagctaaaccagctgctgtcacaccaaccgaaggaacagcaccggctcagcctgctgtaaataaagctgaagaaaggcaaaagctttacgaacagcgcaaaaaagaattagaagaaagaagaaagaaaattttagaagaaagagaagcggcgaaaaaagcaaaagaagccgaaacacaaaaaacaaatacgaccaataattaattaatatttttaaaaatgatgaaacaaatcaaaactttactaattgctgcaatactagttttaggagcaagtaacacgatgaacgcgcaagctaaggtagctcacgttgatgttagcgagattatgtcgaaaatgcctgcaatgctagacgctcaaaaccaactgcaaaaattaagtggtacatatgatgctgaatacaaaaaaatggttgacgaatatcaagtaaaaatcaaaaaatacgaaggtgaagctgcaactgtaactgatgctgtaaacggagaacgttctaaagaagttcaggacatgcaaaaaagaattgttgactacagagacaacgctcaaaaagaattacaacaaaaagaaactgacatcgtaaaaccattaatggaaaaagtaaaagcttctatccaaaaagttggaaaagctaaaggtttccaatacattttagacggttctactttattattagctgatggtccaaacattactgctgatgtaaaaaaagatttaggattctaataaacgaattccttacataaaaaacggtccgtacactttaaagtacggaccgtttttttatgcatctccccgaaataggataaatgcttctcttttgagatcaggcttgcaccctttcagggctttacaatgattattcttattgatagtgcgttgcactatgctattgctgaggctctttcagagcaataataaaggctgaaagcctataatcacaaacatggtgcaacgcactatgaactaagttaagtgtgagtaatgccctgaaagggcaaaagcatatagagtctataaaggtctttacccaaaaaaaactttgtaaagacaatatcaaattaaacaagagcctttctttgtgattaggctttcgccccttcagggcttttacaatgattactcttattgatagtgcgctgcactatgctgttgctggggctctttcagagcaatcgccttcaaataattcaatctgagagtcaaaccgtaaaccaaatgctttttacaaaggattctggaaaacttctcttccaatcactccaaaatctaactcccaatccacaaaaacataacgaaccttgccgaaatcttcgcgctctttgcggttaaactgtcacaattcgactcaagttaaaatgccgttaaaaacaaaaacattcaaagatttcctttcaattgggatatgcatttatatcaaaaaacattaaatttgtcctatgacaaacaacaatcctataggcgtttttgattccggtattggagggacttccatctggaacgccattcatgatctgcttcctaacgagaagactatttatttagccgatagcaaaaatgctccttacggtcaaagaacaaaagaagagattgttgctctaagtaaaaaaaatgtagattttttactggaacaaaactgtaaactgatcgtggttgcctgcaatactgctactaccaatgcgattcgcgagcttcgcgctgattatgatattccctttatcggaattgaaccggcaattaaaccggctgccaacaattcgaaaacccaggttattggaattttggccacgcaaggaacactgaacagcgaactgttcaataaaacagctgagatgtttcagcataccactattatcgaacaagtaggtcacgggctcgttcagcttattgaagacgggaacttatattctccggaaatgactcagttactggaatcctatttacgccctatgattgatgccaatatcgattatcttgttctgggatgcagtcactacccttacctgattcctcaaatcaaaaagatacttccggaacacattcacattatcgattcaggagaagcggttgccagacaaacacaaaatatcctgcgagaaaccgttggttttactgccaatccgaaaagcgaacccgtattttatgtcaattcaaatcccgaggttttaaaatctattttagaccataaataccctgttatcgagaaggatttttaattcgttactcaaattttcgcttaacgaaccaaattccgtccaaggataaattaagggatattttatgataattttctttgatcaggttatccgaaacccttcctctttgtccgtacgaataggaaatatttaaagacgaataggtgttttccagaggtaaattaagccctattgaaattgcggcattatggattcttttgccatcaatttccagataaccggtgtcaaagtttgcaccggcggcatactgaaccctatcccaatatttacgaatatttttccttccactgtatgtgaatcccagggcaaaccgatcctgatttacgaaattgccgtacaattcagattgattggtactgccccacaagcttttttcgtaatccagcgtcatgtttaagttgttcttaaagcgtttactgatcccgatacccatttctaaaggcatataataatcgtctgtgcctgaagccacatcagactctatagttgtgacaacatcatcggcaatagtttgaacggtttgcactttggatgctctaatctgggtcggcactttaaatgttgtcgcaatggtaagagtagaatccacctggtactgcgcacctactgttgcccgaagaccattgtaatgtgtctttttctgaatacttgtaatggaattcataattaagaagcttctgttgtcttttgtatttccaaacaatacagaggccgaagctccaacagaccatttcttaccaaatcggtagccgtaagacaaatccagattatttaatcctccggaaccagtcgccgttagatagtaaaaatcctggctgttttcgatcggtaattttaaattcgagattttaaaagtagcacttgaatacgggcgtattgcgatactaaatcctgagtttttagtcaccggaaaagcaaaagccaaatgggaaaactgaaaattattgcggctttcacttcttgaactgctttgataagtagtcgaaatagcttttcctccaatatcaaacataaaatgattctgcggcaaatatcccagtgatgccggatttagattgttgataaaagtggcagaaggcaaagcaattcctgaagacccaatagaaggaatgtttccaaaatcagaatcgtacacacttcctaaaccatacagcgagtagggagaacttgaaatactttgagaaaacgacgttagcgacatcaaaatgaggcagcttaaacaggcaattttacttttcatttaataagagatataataaattttaagcaggagcttattgttcaaatgtttctgatcgcctaaaacaatccggttaactgtcttagaaatccctggcaaagtgaggataagagaagatctggaactagattgcttcagcatttctttctgcagaaaataaccaattgggaccgagtatccaacattctcattgaattcatccttctttttgttcagaataccaaatactgccgttccggccgaattgaccaacgaagtactgatccggtttaaattatcgctaacataaacttttaaagaatcttccagcggatatttttctgaatacgtattgtttacaggctttaaaaacaattgcgcatctacaatcgcaccattagccgaaatacgtttcaattgtttgatgttcgggaaatcaatccgacaggcaactccggtaccggactgaataaatccctgacgattggttaatgcactggacagcttgctattcgaggcaggcagattttgaattatagttcctgttttatctaacgagactgcattaaattgcttttgtgcatccgaaatcttaaaatctaagatatatggaacttcttccgtattcgcctgatatttggaataatacagccgtaccttactcgacgcaacatgaaagccaataacgtttgctgaattcgaaacagagggaaccagaacaagtccttttaaatattcgctgaaactatcaaaatctgtgatttctctcttttttagtttctgaaaaagagcgactccaaaagcattgtccatcttaagactaatcgaatctttccctactggcctgggtttgtatgaaatggtccccagactttcatcactataacttaaaaccgaattattgtaaaaattcttatcgtttatgtttggttttactttttgatttaaacgatgaatattgaaggtctgtactctagtggtatctccgtaataatatttatcatatttcaaaatcatcgaaatagaatcaaaaacataattggtggattctgtatcagatccgtcattttttaaagaataagaatcggaagccaactgaaaataactgttcgatttcacttttccataaataggatcttcataatttccaattaaaatacggtttttcccggaggtaatcaaagagtcaaaatttatagttgacatctccacagtcatcgtatcaatcaaaataactttattgcccacggccagataatcagaccccactacaaactcacccgtatccgaatcggttccgcatgaaaacagagtcatcgccaaaaataacattcctatgtacttgtgcatattctaattttttgaacaaatataaatggcactctttcgcgacacatcataacatataccgtcatgcttttttacactataaacagccaaaaaatatctataacagatctacatcatcaaatacctcgttcggctttgaaatcggctgtttagtctatcaaaaatcgccatacatatatcttcttttttttaaaaccactagcctcctacttttgaaccaataaataagtaatgaaaataagaatactaattcgttcgttttttttgatttcgtttttcagtatggaagctcaggagactattggcattaacctggatttaaaaacagagccaactgcaaaagctgattttacagaaagtagtattgttctatcctacagcaaaaagactgatactaaaaacaaaataacaaacacgttagcgtattcgaatttaaacgtgaattacgaagcaggcagctacaaaacacaggagaaccaggagcatttcaatcagattaaaaacaattttaaaatttcacatgatttctccaatacatttaatatgagtttttcgattgttcccacagtaaattttcaaagcagtccgggtctggatgacacttctcttttgggaagtttggaaatgagtcagcagttcaattcaaaagccagacttacaattggaatttcgagatcagctgtactgggtaatcctaagttcttacctgtagtgtctttcaattataaattcagcaatgaaagcagtttgctaattggcttcccggattcaaagatttcgtactccaataatattcgcaacacttttaatctgaccaatagcttcaacggtaatttttatcatctggatgaggcaaaacaagcaattgataacgcagcgaaagctacgctgtcgcaaatgactacagcattcgaatatgaaagaaatgtagacaagaactggtttctaaattttaaggccggctatgattttgacaagaaatacagtagaacagacaaagacaatcatagagtttatgattttaataccggtaacagttatgtcttaggaattggcatcaaatacaaacaataaataaacttaatacattatgaataatttaaaaaaaggaatactattcgcgacgctgttttctggtctcttttttataagctgcagcaatgacagcagcgaggagctaataggaaactgggttaaaaaatcggcattcgacggacccgcaagatccagtgcgaccagttttgtcattggcgattttgcttatgtcgcaacaggttataccggagatgtttatctgaaagatttatggtcgtataattcaacgggagattactgggaacaaaaagcggatcttccgggtattggaagaagttctgcctcggcttttgccttaaatcaaaaaggatatattggtttgggttatgacggaactaataaattaaaagatttttatcagtacgatcccagcagcaatacctgggtccaaaagactgattttgccggaacaggccgctacgcagcggtaggttttcaggcgggtggaaaagcctattttggaaccggttatgatggaaattacctgaaagatttctatcagtacaacgatcaagccaatagctggacgcttgtaaatggttttagcggaaataaaagacgtaatgccactgcttttgtaattgccgataaagtttatttgggaacgggaattaataacggagtatatcaggaggatttttgggaatttgatcccgtgactgaggcatggaccagaaaacgagacattgataaagatactgaagacgacagctcctacaatgatgattatgctgttgttcgctcaaatgcctctgcttttgccatgaatggtttgggatatgttgtaggaggagataacatcaaaaccatctgggaatataaccccaccacggatttatgggcagaaaaaacacctatggaaggggcgaccagaacagatgccgttggctttgccatcaacaatcgtggtttttatatgctgggaagaacgggttcaacctattttgatgatgcgtgggaatttaaaccgttagaagcacaaacaagtaatgacaactaaaataaaaataccgttcttctggagtaaaatccgcaagaatgtattgcttatggcacttattttacaatttttagcctgtgcgaaaaaggaaccttttacgatcgaagccttcaaaactacgtcaggttggggttattcgattgctttaaaggataaaatcattatcaagcaggctattattccggtcataaacgactctaaaagctttagtacaaaaagtgatgctctaaaaatggctcagctggtagtaaccagactccatcaaaatagatcccccacaataaccaaaaatgacttaattttattaaaaataaaattataaatgacagtagatacgattagaaataccagttcaaacaaaattctatttcatggtatcatttggattttctttattctgacttcattaattcaattttatgaaagtccgtttaaagttagtcctgatttttatgtgcagtggggtaccggaattgttttgttttatctgaactatttttatctggttcctgttttgctgttggaaaaaaagtactggctgtactttgtgtttgtatctgccctgattttactttttatggttatcagactcaattattttattcctgattttgctcagacacgagtcgtaaaagctttaccgccgccggaagttcttaaactgatccataaaggcgggagactaaagacttttgtggctacaaaacagcccttattttttaaaatcggtccctcttttttttatattttgatcattaccattagtgcagttatcagaacactgaccgaattttacaacaatcagcaaaacaaattaatcgccgaaacacaccgaaccaatacagagttgatctatctgcgcaaacaaaccaatccgcattttttattcaattcattaaatagtatttattctctggcacacaaaaaatcagatttagttccggatgcgatcgttaccttatcagaattgatgcgctatatgctgtatgaaaccgataacaaaacggtcgatttagaaaaagaaatcaattacatccagaactacattgaattgcaaaaactcagattaaacaatattgaagacatcgtaatcaatgttcatggagacaccagaaacaaatttattgaacctttattattgatttcctttgtcgaaaatgcgttcaaatacggaaccgattacaaaggtgctgctcacgtaaaaattaaaatattcattctaaacagcagtctggatttctggattgaaaatacgattgaagactatagtaaagatcctgacaactcaggaattggactggtcaacattcaaaaccgactggatctactttatcccaatgcgcataaacttgatatcacacaagacgacgaattttttcgcgtgcatttgaatttggaattggataaaattcaaaccgcgatagattaaacctttttacataaggttactttgttataaaagccaaaagttcttctacgtatttttatgataattttaaaacttattttattggttaaaaagtacttttggcgctaaacaaaactttaaaactaaaacttcaacagatgaaatgtgtaattatagacgatgaacctttagcagttgaattgctggaagattttgttcaaaaagtagattctctcgaattgatccatacttttaacaatgccattgatgccatttctttcatcaatcaaaacaatgttgatttgatttttctggacatccagatgccgcatttctcaggaatcgatttcttaaatacgatcgagaaaaaaccattggttattttcacaactgctttttctgattatgctgttgaaggtttcaacctcggagcagtcgattatttggtcaaacccattccgtttcaccggtttttaaaatcggtcgtgcgggcacagcaggtattaaatccgaccacaacagttcaggttatttcagaacacactacttcgccggaactggaacaggattttatgttcgtaagagcggagtacgaaaatgtaaaaatgaatttctctgacattctatttattgaaggactaaaagattacgtaaaaatttatactattgataacaaatttactctcacactaatcagtttaattaagcttgaaaatctgctttcgaacaaaggtttttcccgaattcaccgctcttatatcatcaatataaaacacgtgaaatccattcagaagaataaagttttgattagtgataaacgtattcctattagtgaaagctataagacttctttcttcgaaagaatcaacctttagattaaatttcaaaaataaaattccaaattccaaaagtgtcaaaccttggaatttggaattttatttttgaaatttttatttttattcttcgtttttaaaccagccggaatacatgacgtaattgtttgaaatacgctcaatttcgcctgcaaaatcagactgatcaatatcttttacttttttagccgggacacctgcataaatacttcctgaagttatgaccgtattctgagtaacgacagcaccggctgcaataatcgagttgctttcaaccacacaattatccataacaatagcccccataccaatcaaaacattatcgtgaatcgtgcagccgtgaacaatggcattgtgtcctatggaaacattgctgcctataatagtagggtgtttttgatacgtacaatggatgatagcaccatcctgaatgttcaccttatttccaatagtaatgaagttaacatcaccacgaataacggcattaaaccaaacactgcaggaatctccaaaagtcacatcgcctacaattgtagcattttcggccacgtaacaatcttctggaatcaaaggtgtttttccgtttacagatttaatcagcataataaatttttaattaatggcagggcaattacagtcgtaacgttcctttttacaaaataaattgattcccagtgtaatttggtggtaaccacccgtatcaaatttcacatcaccggtaacctgagagtaggtataggcaaacatgaaatttttataattcaccccaacgattggcgtgatatactgtagtttttgcgcagctactccactattagtgccgtactgggtaccattaaaaccttttcgataagacaaggcagcccaaagacttccaaaatccatatttttataagccttaaggtttaaatcgatagtcttttcttttgttttatcgaacacctgaaacaatacagatggctcccaggtcactttacttctttttccaaaaacatatcccgcgcttaaaagaagctttctcagattattactttcatattcggtgtacaattctcttcgggtttccagaacgccctgaactgttgcatgggcataaaaatcaagatagttgtacgatgctccaatatctaaattaaagtacgaatctttttgaatagaaccaaaaacgatagggtcaaaagtagttccaaatttagtttcatccaattgactctgaatcactcccccactaataccaaatgaaagctgatttaaatcgagttcatctctggaaaacaagatatgatgagcataggtaagttttacccctttttgagaatggtaaccgtttttatcgttaaaaataataatcccggctcctgaacgctctcctatcctgccattaaaagtcagggtttgcaaagacggagcatcctcctgaccaaaccactgttttcgggcagtcaatctaattttggcacaatttgccgctcccgccatagacggatgaatgaggtaataattatctgacaaataatccgaataaactggtatcccttcttgtgagtaagagtaggttgatacaattaaaaaaaacaataaaactctgattctaaacttcataaaaacatcatattgatctaataaatttgaggcgccacaaatttaataagatttattggaaaagagtcttaattcttttattaaaaaatcaaatagtaggtattagcaaaaaataactttactaaatttgtaaaaaattacaactcatgacaaaaatcaccataaaagaaactcaaaatccaacaatcttaaagttcgaatttgaagattttattactcaaaatcaaagtttcgaattcaaaaatattgacgaagcacaagcctcccctttagcacagcaattgttttatttaccgtttgtaaaaaccgtttatatttcaggaaactttatcgccatcgaaagatatagtattgtagaatgggaggatgtaaaagatgccgttgccgaacaaattactgcatttgtagacaaaggtggcgtaatcattaatgccgatgaaaccaaagctaaaaaacagccgatcaccgtttatggagaaacaactccaaatcctgcagctctaaaatttgtggtgagcagaatgctgacaagaaatgcggttgaatataaaaatatcgatcagactgcttcttctccactggccaaagagttgttcaaattcccgtatgtaaaagaagtttttattgatgaaaattatatttcggtaaccaaatacgacatcaacgactggcaggaaatcacacttgaagtacgaacttttatcaagcagtttatcgaaaacggaggaactgttttagatgaaagtctaattgaagtggctacaaaaaatgatatcacaaaagacgaagcatttgacaaactggatgttacttcgcaacaaatcattaacattcttgaagaatatgtaaaaccggcagttgctgctgacggtggaaatattgcttttgattcttataatgaagaggacaaaacggtaaaagtaattctacaaggagcttgtagtggctgcccgtcttcaacttttactttaaaaagcggaatcgaaaatatgctaaaaagcatgttaaatgacgaagccataaaagtagaggctgtaaacgcttaattttttatcctttataaaataccgaaagcgtctgtcattggcaggcgcttttttaattaaaacatatatctcactaattatcagcaaattattaatcaaataacgctgtactattttaaaaatagttaatattgtattctaaaccaatcaatatcaagactatgggattatcttcattctttaagaacttatttggcacagccaaagattctgctactgatctggcacatcaggccgaaaccacttttgaacaagccaaagaggccgctgctccttatattgataaagcagaaaccttcgccgaagaaactttcgcaaaagccaaagaagcatcagaaccgctgattgaaacagcaacggattatgcgcatcaggcgaaagatattgttagcgagtatgttgaaaaagcatctgattctataagcgatgtaattgattctgtaaaagaaaaaaccaccgaactaaccggagaaactaaagcaattgtttcagaaaccgtaacggatagcagcgaaaaaacggttactaaagctgatgatgttattgatgggactaccaacaaggaataaaactcctttttcttataccgggaaatatttttatatttgcaaaactaatataccttctctttgggaaggtttttttattctaaaaatatgtacaattcagaacagattagcaattatgctgctaaatttattaacgtattaattgattattctccaaaattaatctcggcattcatcattttatttgtcggaatctatgccatccgattaatcagcagaatcatcacaaaaataatgatccaaagaaatctggatcccacattgacccgattcctctctgacatattgatttgggcacttcgaattttattgtttgtgacctttatttcaaaattgggtatcgaaacctcctcttttgttgccatattaggagcgatgggtcttgccgtaggtttgtctttacagggctctctatccaattttgcaggaggaatgttaattatcgtattcaaacctttcaaagtaggcgatacgattgaaacacaaggtggagttattgcaacagttgtagaaattcagatttttgtaaccaagatgttaaccgctaacaatcaaactgtttttgttccaaatggagctttatcaaacggtaccattatcaattattcaatgcaaggagaacgaagagccgatttgacttttgcggtttcgtatgattctgatataaaaaaggcaaaggacattcttttgaacgttttaaacaacaatccaaaagtacttaaaaaacctgctcctgaggtttttgtaaaaaacttaaccgcaagttctgtagagtttgccgtacgtccatgggcaaaaaacgctaattatggagctgttttttctgagactttagagaattgtaaagcggcattagatgaagccggaatttcggttcagccgtatactcttcaaaaataaaaaggtttatgctttttttgatggaggagccatcataaaatcttttaaataataaggttcaaaataagcgacatcaacagtgtcgcttttttgatatttatcataactgatcttactcatcgcagcagccgaaggatatttgatctcttccaaaaacacaaaatttgattgggttaaaactgttttgcatttttcggcacaatcacctacaaaatacacagtctctgtataccccttaaaagaatcctcagtaataatttcagcctgaattgttctttccacttttaaatcagctgcaaatatttcgctatacacttccattcttctggcatccagcattggaataattttcccttcggaaaccttagcctgtgaagctaatgtttgtaaagtatcaactgcaatcaaaggaatatttaaggcaaaacacaatcctttcgcggccgaaaccccaatacgcagaccggtataagaccctggtccctgactcacggcaacagccactaaatcctcaatcgcgacaccagcttcagcaattacctcttcgataaaaacgtggagtttttcagcatgtgaataaccttcttcggcaatttccctgcatataatggtttctccgtttttagcaatggatacggagcaatttttggtagcggtttcaatattgagaataaaagacaatgtatgtaattttaaatttttattatgacgcaaattatttcttagaagtatctgcttttttgagttttactttatctccggaattcaaatctttagagacagtggtataaggtcctgtaataacaacatctcctgctttcaatcctgtcattacttcgatattcgtatcgtcctgtataccggttttaataattttaatttgggctttgtttcctacttttacaaaaacgcactcaaactttttatcgcttttcggagctgcttttttatcttcgtttggatcttctaccttaaagtcttttaccgcggctgtatcagatttaaccacaaccgaactgattggcactgccaaaacattgtttttagttttggtacgaatatcaaccgtagccgtcattccaggtctgaaaggagaataagtacttggttgtccttccagtaaatcctgataagattctttcagtatacgtactttaactttaaaatttgttacctgatcagaagttaatgctgtactggccgaattagaaatactggttacgatacctttaaatttctttttcagataagcgtcaacttccacgttagcttcgtcaccaattttcaccttaacgatgtcattttcgtttacgtcaacttcaacttccatattgtttaagttggctacacgtaaaagttccgttccggccatttgctgcgttcctaagacacgctctcccagttccacatttaaaactgaaatagttccgtcagcaggagcataaattaaagtacgccctaagttgtctctggcctctgtaaccgatgccgaagcacttttaacattgtaatatgcattttgcttggtggccttggctacttcataagtcgaaattgccttatcccaatctgatcttgaaattactcctttttcgtataacgttttgttacggtcgtaatttgcttttgcttcattataactagcctcagactgcgttaaaccagccttagttcctgacagattagccacagtacgatctaaaccggaggtgtacaaatcaggatttatttttaccaataaatctccttttttaaccacctgcccttcttttacatttaacgcaataatttctcccgaaaccattgacgaaagcttcacttcaatttcaggctggatttttcctgttgccgaaactgtttcaacaattgttgaagctattacttttgaaatttctacttctgttccttcatccttattcccaataactcctgctttcgaaagaccaactaaaactgcaataagtgctactgcgccacctactaaaagataaatcgtttttttagacataataaattattttgtaacaattggaacaattggaattccaaagtagaattctaatatttttattttaaatatataatcgtattttgttctgatcacatcagactgtgcattggttaacaatgtttgcgcctgagtaaaatcaaaagaattcattaaacctacatcatacttttctttcgcatagttataggcctgctgtcttgcttctaatgttacggtagacgattcgtaagtatttaaagctccttttgcatttgtaaaagctgtataaacattacgttgcaaatctaaacttttttgctctaaatctattttagatttctctaaacttactttactacgctctacattatttcgaactgaaaaaccgttaaaaattggcacatctaaacgaaatccaaaactatgtcccttattgtcactaaactgttgaaatattggatccggccctactaggtatggtttattattttcatccaatctggttcggtcactgtaactcgctctggtatcgaatccatagaatcctcttaatgttggctgataagctccttttgcaatggtaacacttttctgtgcaatttcaagattggtttgtgccagttttagttcagttcttgtttcttttgctttattgtaaatctcatcgggagtttgagccataatgttattttcatcttttgcgttagtatcatctaccacatcaaaatctgtaaattcttttagttgtaaaagttgggccaaactcaattttgagattaagaaattattctctgaaacggtgatattttgtttatcagttgctacagttgcttttaaatcaaacaaatcacctctgggaatagtcccggcattaaccatttcctctgaacgagccaaacgtttttcatcaatcgttagctgttctttttttatttttaaatcttctttattcgaaaggatctgaaggaaggcattggccacattcagcgaaatatcttcctgcattttcatcaattgatactgtgaagctatgatggcaagttttgttcttctatacgtattttgaatttgcaaacctttataaatatcgactcccgcacttaaacctacagaagaatactgtgttgtttgattacgcaaaagaccggttgtaagatcctgattcaaaccaatgttccaggaatgtgatgcattgccgcttactgacggaagataacttccaaaggcagcccttttgtcaatcgctgcattttgaacatccagttctgacaactttattgtgatattattttctaatgcataacgaacacattcttccaaagtccatttcttggtttgcgcctgaccagacaagccaaacccgaataacaccgcaaaaaccagactattatatttatttattttcatatattttgaatgaaagcatagtaaccctactacacaaatttaacattttttaaaaatcaaaaattctttatttgctcaaattacttattttcttcttcattgatcaaaccctgattccagattttaattttatccgaagctttgattccgcttttcacctcgacataaattccatcacttactcctaaaactaaatctcttctttgaaatttctgagggttagtttcaatctcaacatagggtttttgcgtttttttatcgaactgtaccagtgattcttttattgccaaaactttatctgctttttctaagataattgaagcgtttgcacttaaacctgctctgataaaagtagcatctctattcaccaaagctgctttaatttcaaactgaattgctccgttctctaccactcccttaggcgcaatatcggtcagagcagcttcaaattttttattctcgatcgctccaacggtaatttcaattggcattttttctttgattttccccacttcagattcatcaatttttccaataaaaatcattcttcccacatcagctacgctcgcaatagtagttccttcattaaaattgttactctcaataacctgatttcctacttttaccggaactgccagtaccattccgtttactgttgaacggattaacgtattggcataacttccaagtgaagttgttgttccagttttaacaatatctaaactttgctttgctgccagatagttttgtttggcctgtttgtacgctaattgtgctgcatcaaaatcatttgctgaaattacgtccttatcaaacaatgttttttgtctttgatatattttttcctgattgtctaaagcaattttggcagtctgtacctgattctgtgtactgcttacgttagaaacattggctacaactctaattttggcaataagatcaccggctttaattttctctcccgctttgatatacacttcttcgataatacctgagatgtttggtttgatcaggacttcttcattaggctgaatattaccggttgcaatggtatttttgatgatggttttaatctctgctttctccgttttaaatacaattggagactcttgattcttagcgtacaggtaatacagtgcgccaaagaaaactatagcaataaagattaaaatggttacggttactccttttttcattgtgttttcagtttaattcgattatattctgattgataatttattctgttcgtaaagcatctacaggcttcacattaattgcggtttgtgccggaataaaccctgccagcaaaccagatcctactaatattattaaagctacaaatacgactcctaaatcgacgcttggattagcaaacatcgtgttactatccggtggcatcgaagctaaagccatatttaagagcgcgataattccggtagctacagcaatacccagcattcctgaaataatcgttaaaaatatagattcagataaaatttgcccacgaatcgctgcaggagttgctcctaaagctcttctaatacctatttctttggtacgttctttcactacaataagcataatattcgaaataccaattactcccgaaatcaaaaccaaagtccctacaaaataggcaataatttttaggatgttaaataaactttgcactttattgtactgttcgtataaatcaaaattcccaaccgctctttcatcagcaggattaacggagtgaagtgcttttattttttctaaaatttttggttttaaatcggtaatagatgtaccgtcttttgcggttagtgccatccaccctactttatctccaaaattaaaagcctgctgaaaagtagtaaagggaataaatatatttttttgctcctgctctgcattccccccttgctgttttgatttataaacccccaccaccatgaaattgatcccgttgattttcacataagttccaatcgcttcttcttcttttccataaagttcattggtcactcctttaccaattaccgcaacttttcgtctttcgagaatgtcctgctgattgacaaatcgccctttaatgatatccatcggctgttgtttaatcaactccggataatctccgtaaatggtaaatgcagaagttttggtaccacgaactacattattggttccgttaaaatcacccagctgatttcgtggagacacgtacaccagatccggtaaagctgattttaatgctgcaacatcgctatttctgaaatcataacggcgtactttaggcaaacctttgtaggctttggttgtggtttgactccacataaacatcgtatttgtcgcaattccgtcaaaaccttttttcacaccattctccaggccattaccagctgccaataaaatgaccaaaataaaaatcccccaaaacactccgaatgccgttagaatggttctgaaaacgttggctgtcagagcctgtaaaatctcgtcccaattatcttttttaaacataattattcgtctctaagtgctacaatcggtttaattttggctgctcgatatgccggaaaaaaccctgccatcgcccccgcaaatacaagcagtacaagcgtggttaaagctacactaaagtcaacttcaggatttctaaaatattcactttgtaccagcggtcccacaaattccaataacgctaaactagccaataagcctataaatccagcaatagtggttataaaaatagattcatgaaggatcatcgaaataattgaaaaaggggaagctccaagtgcttttcgtattccaatttcctttgttctttcttttacgatgattagcataatattacttactcccacaactccggcaatgatcgtacaaataccaacccaccaaaagaacaatctgatatacagatttaaatcataaaattgtttcgcttcttccactgaattaaaaacacctatgccgctattgtcatcaggtgcaataacgtttttgcttttcaacaaggcttttacctctgctgtgaattttcttgattgcgccagtgcctcttcataattcatttttttatttaaaacaaactgcattgcgtctattttatcaccagctccataagcgcgctgattcgtcgtcataggcatataaacccttgattcttcgcgctctcctgaaggatctgtaaaaaccccaatcactttaaaattaatattattgactaaaatctcttttcctaacgcttcttgccctttaaacagatcttgctccaccttcaaaccaatagccgccactttcgcattatgtatcatatcactattattaatgaaacgtcctttaacaatagttgcattttcaagatagacataatccgaactaatccctctaaacagataatttcctgattctttgccgtaactcacaatcccgccccaggtactacgtacaggtgactttttatcaatctcatcatcaaactttttaaccggaagatcataatcactatttcttaactgaatttgccttcccggatttagtcctttatattctttggttgttgcttcagaccagacttcaattattccttttgcatcattttcaaattgtttctcgattccgttctgaagcccttttcctgctccaagcaaaatcaccaaaataaaaatccctgacgctacagaaactccggtcagaaatgttctcaaccggtttttagagattgcctcaaatatttcctgccaacgctcaatattaaacataagatgaagctctaacttgttctacctttttatcatcgataattaatccgtctttcaggactacatttcttttgcacattgcggcaatatcaggttcgtgagttacgattaggattgtttttccttcatcgttaatcccctgaatcagttccataacctcataagaagttttagtatccaatgctcctgttggctcatctgccaataaaactttcggatttgaagccaaagctcttgcaatggcaacacgctgtttctgacctcctgaaagttcattgggtaagtgatgagaatgcgaaccaagtccaactttctctaaatatttcatcgcgatgtcataacgctcttttcttttgattccctgataatacaaaggcattgcaacgttatcgagagcagttttataattgatcagattgaaagactgaaatacaaatcctaaaaacttattgcggtatttagacgctattgtttcgtttaactttttgatcggggttttatccaaaatataactaccggaatcagcctcgtccagaattcctaaaatattcaaaagcgttgatttacctgatcctgacgatcccataattgcaaccagctcaccttcttcaatattaaaattaattccctttaacacatgtaactccgaactacccattttataggatttgtgcaaatctttgatctcaatcatggtggttattgttaaattttaaaacaataatagcatttttcttaactattttatggtaagaaaacgttaataattatctcttcttctttgaataagactcacttgtttgctaattgttacacatttttataataatataattgttttattaattttgtcagactaaaaaaaatcataacgatgaagttttcttccattatctccttattcaccctacttgctgtacttgcaggctgctctacagcccaaaaactggaaaccctaaaaccggagccggatgacgcaagtccgttagtttacgaagcaaacccctcctttatcaatttaccaattacagtaaaacttagcgatattgaaaatcaaaccaatacacttttaaacggattgatttatgaagacaatacgatcgacgacgacgatatcgaaatgaaaatctggaagcaggcgcctataaaaattcaaaatgaccccgcaaacccagacaagaagataaaaacaatcctgcctttaaaagccactgttaaataccgaatcggtaccaaaaaactgggcgttgaactttacgacatcagagagtttaatctgaatggtgtgattaccctgtccagtgaagtggcactgacaaactggaaattaaacactaaaacggagtttaaatcattagactggagcgaaagtccgaccatgcagatttttggtaaaagcatgcctattacctatctaataaaccctgcaatttctatttttaaatcaaaaattgaaaagaaaatagacgaggctatcgaaaaatcaatggatttcaaaccaaatgttttaactgccttagaaaaaatctgcactccttttcaactgagtgacacttacgaaagctggcttagaattgttcctgttgaagtgtattcaaccaatgccaaattaaaaaatgatcagtttttactggacatgggaatgaaatgcaacatggaaaccatcgtaggcaaaaaacctgaatctaaattcagtgccaataaaatcatattgaaacctgtcgctaaaattccgaatcagatttcagcaaacattgctgccatatctacctatgttgatgcttcaaagattatgactaagaattttgcaggtcaggaatttggttcgggcagcaaaaaagtgacggtaaaaaatgtatccatctggcataaaaacggaaagatggttattgctctagatgttttaggctctgtaaacggaacgctttatttaaacggatttcctcaatacaatcctcagactaaagaaatttactttgaaaaactggattacgttttagataccaaaagcagattaatgcgcacggcaagctggttgggtcagggctatgttttaagaaaaatggaagagagctgtcgttattcgatacaacccaatttagaggaaggcaagaaaaacatggcggcttatcttaaaaactattctccattgccgggtgtttttgtcaatggaaaaatggaagacatccagtttgataaaattcaactaaccaatcaggccattattgcctttatcaaaataaacggtaccgtaaatgtctcggttaacggtttgaaataataattaggtaatgagatcattagacaattagataatgaatgaattgccacattatctaattgtctaattgactaattatctgtttttttcttttttgactggtacattctgtaaatcagaacacctattactgccaccaataaatacggaataaccattaaatatacgattccattatttactgcttctgcttttttaacatttgaatctccaccaagcgctgcacgacacatcgcacattgagcatttgcgcttagcgaaaagagaatagatgcaagaatatagaagcatttcgttgataaaaaattcgcaaacctacttctaattgcttttctattttctttattctttaatctattttccattttaagcataataaggagaaatcattaagtaaaccacaacaccggtaactgcaacatacaaccatagcggaaatgttattttagcaatttttttatgtcggtcaaagcgttttgccaatgcacgtacgtacgttattaataccaatggaataatggcaatagacaataaaatatgagtcaccaaaataaagaaatagatataacgaattgctccttcaccaccgaatttagtagaatcggaggtcatgtgatacgccacatacattactaaaaaagctaccgaaagtccaatcgctaaagtcattaagcgttcatggagcttacgttttccatttttaatggccaatacagcccaaactaaaactacagcggtaataccatttgttgttgcgtaaattggaggcagaaacgaaagcggctcaacttcaattcctaagtctttcaattttacaccaaataaaatggctaccacaagtggaattacaattgaaaccgcaacaataaacttactaaattttttctctaatgaatgatcttccatttctattcttctaataatattttaatatcttcctgtatgtctctaactccttttttatctaatccgtcataatagatatttgggtttccgaattcatcttttctgcaacgaatatttccttctttatcaattaaagcgaacaaacctgaatgttcaaaaccaccgctcactttttcattctctccggcatataaattgaatcctttattagacaattccatgatcgtattcttatcccccgttaagaaattccaggtagaagattttactcctaataacttagcatgttcttttaaaacctgcggcgtatcatgtttaggatcaattgtgatggatacgattccgaaatttggatttccgaaaaaagtcttttcgatctccagcatgcttaaattcattttcggacaaattgacgggcaagttgtgaagaaaaattctaacacatacacctttcctttgtaagtatcattcgaaactttagcattgtactgattggtcaattcaaatttcggcgctggtccaattttcatcaatttaccatcagcctttgaagttttcaatcctacattgtccagacggtttccttttacaatgtctccgtttttaactctgtcaacaattttaggaacggcataaattccaaaaattaaaataataaacgaaataccgatatatgatttattcttaaacatgatagaaagattaaagttgtttagttgcgttgtgattcttttttagagcagcacgatattcgtataaaatgattttaaaatcatccagcatttcattgcttagctctgaaggatgaaaagtgtcatacccttctttgtattcagctgcatcttttcttcctctaagatttctttctttatcgacgataaaaacattcggagttccaagattctgatctaattttccttttaactttagctgatcgtaaaatgcctgaatttcctcaggtgaagcgaagacaaagttccagcctttcacgtctgtaaaaggtttaagagcatctactactttttgcgcatcggcttcggttcctaacgggcaaagtattacaaactggagatcttcaaaaccgttatagcgcttgtaaattttttcgtttaagttaaagtaattccctcgattgcttaaaatttcagaccctgaaaagccaagaaccgtgatctttttatccaacaaaactttctttccattcagggatttccaatcaccgaaatctttaatttttggcgttataacaggaagtgtagtaaagctgttaacccctgaagcaaaaaacaaataggctacaattggcaaaacaaaaagagcaaagagaactatattttttttcattatatctgtacaagttattgaggtacaaaaataaaaaaatcccgatgttatcgggactcttttcgaattaatatcatgttaaaaattccatttaatagtagaatctttaaaaaccccataaatataatgtccttctgttaacagagtaaacaatagatataataccaggaaaataacaggtgctacaacagaccatctaaggctgcttttttcaccttccatgtgcataaatgcccatactatataataagctttgaaaattgtaaggatgtaaaaaatccagttcaataagttcaagccaacaaaatgattaaactctaatgatgcaggtttgtagatacctaaaataacctctactgtagttactactgatagtaatgcaaaaacaaaccagattctttttgtatttgatacgtgctcgtgtgacataataattaaaatctaaaattaaactaagtagaaaactgtaaatacaaatacccaaactaaatcgacaaagtgccagtataaaccaactttctctaccatttcgtagcttcttcttttttcataagtacctaataatacattaaagaagataatgatattaatgataactcctgaaaatacgtggaatccgtggaatcctgtgatgaagaaaaagaaatcagcaaataatttatttccgtattcgtttctaatcaaattagcaccttcaaccacatatttagcacttgctaaacgagcttcagactcttctcttgataaaactgtttttttctttttatctgtaagttgttctgttctgattaaaacttcaggatgagctttaaaacctgcctgaacttctgcaactgtataagttggctgtgcctgagcatcttccataaaccatgttgaatggcttcttgttaaagcttctctttgttccggtaatttaaccgcaaaatcagcaagagcaactcttttaccatctttatcaacaaactgcagtaaacttcctcctgctgtttcaactgctccatactctcctttaatgaagtttttccactcccaggcctgagagcctacgaagataaaacctccaataatcgttaagaacatataaattgcaacctttgtttttttcaattggtgacctgcatcaacggccaaaaccattgttacagatgagaaaatcaaaataaaagtcattaaggctacataatacattggtgccgcaacgccatgcataaaaggaaagtgagtaaacacttcatcagccaaaggccaggtttcaataaatttaaatcttgaaaaaccataagcagcaaggaatccagagaatgttaaggcatctgatacgataaaaaaccacatcatcattttaccataacttgctcctaatggctggatctcatgaccgcctccccaagttttttcgtcgttgtttgcagtagtaactgtcgctcccataaaagatattcgttaaaaagttcccaaatttacgtttttttcttatttaaagaaatataaaaataaaaataaatacaaccataataaatccaaaaagtgccaatacatcgcacctagttctataccaagagtttgagtcgaattgtatttttgtttaaaatgattataaattataattaaaagtgaaattaatcctccagccaagtgtaacaagtgtgtcacggttactacatacaaaaatgttgtagtaattgagctaccttctcctgtaaaataatacccgctttctacgatttgtccaaaacctgcaaattgcagcaccacgaacaaaatccctaaagctaaagttcccaaaagtaaagctgtagtagcacttctattgtctttctgaatggcttttttagccaggtaaaaagtaacactgcaagccaaaataactgctgtactataataaaatgccgttggcaattcaaaattcttcaaccagtcggctcttgatttacttaccacaaaagcacttgtaagtccggcaaacatcatggtcatacttaccattgcaaacaagaggataagttttgccgatttggctttccttagcttctcttccgctgccgtttctgtttttgtcattgtcatttccataactatcttaaaaatttatctactataaatacgatttgcagtaacgagatatacgaaacacttaccaacattaatgttctcgctgcttttggtgttcttaactgatacaaacgtactgcataaaacaacatccataaacctaacaaaaacactaaaattgctgctattggcgaaataaacaattgccctgtatatcctaaaaccggtaataacgaagcaacaatcaaccaaactgtatataaaataacctgcaaagcggttcctttatcttttttccctgttggcaacatgaagattccggctttctcataatcttcatacaaaaaccagccaattgcccaaaagtgaggaaattgccaaaaaaactgaatcaaaaacagcgttccggcctctataccaaattctcctgtagcggcaacccagcctaacatgaaaggaattgcccccggaaaagcaccaacaaaaacagacaacgaagttaccgttttcaaaggggtataaatactggtgtataagaatatggagattgcggcaaacatagccgacttagcatttatagtgtaaagcaaggcaataccaataatagtaagcaaacttgctacaaacaaagccatttttggagacatgcgtcctgaaggaaccgggcgatttttggttcggtccattaaagcatcgatatctttttcgatcacctgattaaatgcattcgaagctccaaccatgcaatatccaccgattgccaaaactgccaaaacactccatttaaaaggatgttcctcattaactcccaataaatatccggccacagaagagaacaatacgctgattgctaaaccagctttggtaatctctttgaaatcggtaaatattgattttagtgaaaatgtatttttagtcgcgttcaatacagtaattatttgtatgtttttttttgagtggtgcaaatgtacaaattagattgtagaatttagacctataaaattagatttttttcaataaaacctttacaaaataaggacttgcaaatctttaacactattatatcaaaaaatcttattaaaaacactagtaatcaaaataccaattgaagatatcggaacgcaatccgatagaaaaccaggtggtactttgcttaaaagttgtgggtgtatttttcgtgggatcaaaatttcgatataaaaaacttccgaacagtttcagattcgtcatcgggtttatcaggtatcccccttgtatatctgctataaaaacatttgttttattcccctgtcctacttttacacctttatcatacggtcgtttctcatcatagtttttataaatgttacctccgtaattaaagctatcttcagcggtatcaaagtccaaacctctttttccaacggtaaatttcgcatcagcaaaataacgccctttatgataacgtccgattgccaccagttccgaaaaattgcctccccattggtgtcctacactctgattgttgtgcccataattggtaatcaccgcactgtgcgcatatacatacggacgcacatgattgtattctaactgcagcagcaaatcttttacttcaaatgcattgaaatattttgctcccaattggtatccgaatttatttttccagctgccgtctccgcttttcatatctcctaatgaaaattcatccaataaaaactgagcatacaaattaacagtattgctccacttgtatttagacgttactcccaataatgcatttccacttcttgatgatgatgcaaactcgacagaacggtagaaaataattggattcacaaaattaatatcaaaacctctattatttgtatcggtccagactaccgattcaaaaaagcccaagttcagtttattagacacgttccaacttaagtaatgattggccatgaattttgtggcataagttctctccagggtcacatccggacgaacatctttgagccacatgtaagtattcgtatattttattttccagaaggtggtattgattttaaaatacggatacggacttgctccgtcactttcgagcaatgaacggtatccgtcaccaataaaatttcttccataacccaattgcagatcaaaaaatttacttggcgcgtaggtaatatttgcttctgctaaaggaaaatcataagcatccgttttgaatcgtttggcaattcccattcccggaagaatagccggatttcctcccgacggttttagtgtctcggcaaaatcattataataacccgcaaatcgcccctgactttcaaagatagttgtggtaaaattgatttgttttcctaatcctcctctgaaatttaaggcacgtgtatttacgtaggtataggaagcatccaaatccgaagcttttcccatttgtagatccacaataggatttaaggacagccaataatcttctccctgaatctgaaccatattttcattccagaattttctccccagccaactggagacatttttctgaagggattgatttactgcttttaaattataatattttgaaacttcagcatacgtatacggctttgatgcggtatgattattacttcccacctgattcattgctttatcaaactgtgcataatagctgtgtgaaaacggaatattcaaatgactttcaaattccggattgttgtattttttatacacaatactatccagttctgtcattggcttttccagaggctttaaaatttgggcagcagccaatgcttcctgagcaatctgatcggcactttttaaaggaatatcgatcgaaattgtgtatttagaataagttggttttccgttataggtagaaggcttgatcttgggaaacttcttaaaaacacgtttagcttcttctgataacgcatcgtttaacgcgtttacataaatcactttaaactcgccatttgcatctacttcaaataagacttttacttcccctttataattggcttgttttagattttcaggcacctgataattctgaaatacaaaatcctgcacttctttataaaaacaattttctagttgcttggattgaagattttcacagtttggaaaaaccggaaactgttctgcagcgaaaccaggtttgattgaagtattgttactttcctgcgaaaaagcaaacaaagcggttaaggttaaaataaaagacagggcaatcttattcacgtaaatttaggtttttatttaatattgatttgaggtattccctccatccgcaattgtttttgcagcagaggttccgattcgttttacacctaagcgaatcatttctatggcatcctgataagaccgaactcctccggcagctttaacaggcaaaggtgatgcgttttctaacatcattataattgttggaagggtagctccgtttggcaaatcgttttcggttttataaaatccagtggacgacttcacaaaaactgaagcgtagttttcttctttaaaatgagacatcactacatttttgatcaatgccgaaagctgaatgatctgtgtatcatttaaggccgcaacttcaataatccatttcactgttttattacttgcaagaccaatttgtgttcccactaaaatctcttgtctgaccaggtcaacatctccttctttgaatgccttataattgcaaacaaaatccagatcatctgctccgtcttctattgctttgttggcttcttttaatttagactctaaatctgagtccccttcaggaaaatcaatgactgtaccgatcagcaaagtcgaattggctttatgaatcatttcttttgccaaaaccacctgttcaggccgaatcatgattagtttaaagccttcgcgaatcgcctcttcaatagcatttttaaccacaagggtattttctgcttccgaaagtcctgcctgggaggctgtttttaaatacgtagagtccaaatattgcttaacattcatgatttgcgcgtgttctgagaattctgcaaaagtacattttaaattagaatgaactgcaaaggccgggaagatttacgtaaagtagccacgggtttcttttaaaacaaaggaacatcattaaattagatgattttagaatgaagattaacgattgcagatttctgacctaatgctgctcaatagttcaattatcaattttatatcctttcaaacatctgacatcaaaaatcgttaatcaaaaatattaaatctttttttcattttttccggactaaataacattgctcgcgaagccgcaaagctttaaccagccttgaaagtgttaagattagagcacaaaaaaacccaccgaagcgggttttatattcttaaattttatcgatttgttttttaaaaactatagcggcaaagatgccaaaaatagctccaagtgtattggctaaaacatctgttacatctgatgctcgtgtaaccgttaaaacaccttgcagaatttcgattgtaattccgaaaaaaacagaaaatataaatgaaattaaataggctttgtaatcgtctggtgcttttcctttcagctcttttttgaaaaacaaaatccaggaaattgtaaatccaaaatgaaaacaaaaatggacaatcttatctatactcggaaaatttaccgccggaatattactggaatctgttaaacaaaaataagtaatgattcctgagcagataattgcccagattaagagcaattgtttaggcacctataagttctttataagcgtcagcagacaataaagaatcaatttctgatgcatcagcaattttaattttaatcatccatccatctccgtaaggatcagaattcacagtttcaggctcgctttcaagattttcattgaaggcaatgatttctcctgttaatggtaaaaacaaatctgatactgtctttacagcttcaactgttccaaaaacctcgtctctgtcaagtttttgatctaaagtttctacttcaacatacacgatatctcctaactctttttgtgcaaaatgagtaattcctactgttgcaacatctccttcgatgctaacccattcgtgatcttttgtgtactttaaatttgctggtatgctcataatagttgtgtgtttgaaaattgatagtttaataattgaggcacaaatgtaataatcttataataaaatcctctttagaaattcaaaattaattcccaaaattatatcgaagtgtaaatcctgatctaatattcgttaaagggaatgatgtcgagattaccgctttcgaaaacgaatgatcgtaatagaatatcgccgtcaggtttttactgaatgcatagtctgccgtaagttttaacgaccatatattttgtcctgccgctaattgattgttgtcataatctaaatagcgcactaaggtttcattatttcgatacgagaagtcacacttaatattgatatcactttttataattcccgttggtgaatcagcaagtcttgaggagaaaattacatctttaaaacgatagcccaaacctaccacatattccattccttttacttcggtcaataaattattatcaaaactcatagacaaagctctgtcttttttaatctctgtcaatacacgtaatgagcttttcaattcaaaatccattctaattaacggactgaattgctccacgaggttaatattagacatgatggttttgttaaagaaattggtattcacatcctgtccattaggcttctctatatagtcaaaattagatctgaactgattgatggtatacgatgctctgtaattatgctgcaaagaaaaacgcttgaatttgtctttgaaatatttataacgcattaaaccgttgtacttaatactccagtttggaattggaaaacttctaaaaatatctgtcgagctgcttgatgcattactacctgtataggctgctaaaaatgctggtaataaaaccgcctgattgcttttggtaaatcctatcggatacccttcattagcagtatatactttataattaggatctgtaggagccggaattgggttattagcatctccatatctcggaattggcgctcctgcaccataacgctcctctgccagacggtttgctataatcatacggttgtttctgaaatcatcaaatgcggcagactctgttgcagtgctggtcgaaaatgctgtttttataagcactgttgaaatagagaacatcccataattatacggtgacaaagccttataatctaaatctccggtcacattatttttaacaacactatactgctctgaattattttcagaataattacgatccatgttcaggtcaattttcaaatcaggcaataagtcgatgttcgccgttactttcagaagcttattggttacctgagtaaaactttgattaaaatcctggtaagaggttaaccatcctcttttcgccgcttcaaaacgaatgtcgtcctgacttccgaaaacaaatcctaaagtaggtctcgatgttccgaaaaaaccaacacccggtgtataccccggtaaaacggttccactattcacggtataatttacctgaacattttttatactggtcagaacaccaatcatgccatcatagaatggactgctagtggtagccggttttgccgtatttacaatcttctcccccggttttggcggtgctgccgctttaggttttgctcctgtttttggacctggagttaatcctaaatacttgtacagcatgttcatgttaagcgttgtcgtaagtgtattcgaattggcattctgaatagtgtttcctaaatcaaaagtacctccgctgacaggatcaacatattcagataatgcagtcgaagcgcgctgccaggtatagtcggcggtatacgaataatttgctttgataaagcttaaaaccggaattttatgaattggaatatcatagttcaacactaactgttgtacgtgctgatttggtgttccaatatcaaaataatcgtcccagatattaaaatcctgttttggtgtattgtcatcatttagaaaattccttacgatattattggatgcagctgtatagttaatttttaaagatttcgttaaattgaaaccaaaaccgtactgataattaaaggcaaagtttcgtctgtacaacggatcaagaccaattccctgtacctccacttctctaaattgctggcggttactttgtctcaaaatattcgtgttaaaggaaacatttgaaggcaaataattaaaattaaaatcactcagcattttccaatactcacttttcttcatgaatttagtcttcttgaacggaaccacttcttttggctgaaaggtgtacgcataattcacggcactattcgattgctcgtctacgtaatctgccacttcataatcgtgacgttctacctgattgtacgattgtgaaaaggtgaagttttcaacgtcataaacatgcggcttctgttccggtgctctgtcttttcttacgccgataaagttaatacttcttcttttggtatagtcaacagctctggttctgatgttttctttctctgcctcatcggtcgtttctttaatcagctgttttaattttatatcctgattgaacgggtcgtattctggtgtgataacttcttctccaattgcgtaattaaacggcaaattgattccccatctttgtggtaataattttcctaaattcaaattggtaacaatattatactgctgaagatcttcacggcttctctcatttgctccttgttctaaagatccaaaaccaatggtactctttttaccggtagccgatacggtagcaaaatctgccatattggtatcgatatttaaaattgccgccataccacctttgttctccagatcggccattcgaagttcgttgaaccaaatctctcctttgatggttttatgatctgccctactcttaacacctaccatcaatgttcggactaaaccaaaattagggtttcctttgattcctaatcttaatctgccgtctccatcacctccgccaatactcagatcgtcatccggataataaatcccattaacatctcttttatcagaattaatatcaacagtcatccccttaattttcattcgggtcaataactccaatgctaaatcaatattgttctcttccagccaaacctgatccggacttatgctacaggaccctccggttctggtcacttttaaaggaacttcgacctgatagaagttttgtgtaaagtcatttccaaaacggataaaacctaccatttcatcatcgagtaacgtattttcgtttggcaatgattcagcatgtaaaaacattttcagttttttgtactgacgcatgtctacacttacgttcttaaaaaccgctcttgaatcctgatattgtaatcctgaaccgctcactctaaccgctaaggcttgctcattttgattgataatcgtattgttattatacaactgctctctacgaacgcccggtggcaccacgtaattcacaggacattttgtaccattctcctgaatgtttactgccgcaacatcaaactctgttccatcgtcagccggatttgtatcattggcatcaagtgtaccggtatatcttctccattctcctctcactaaatccaaagctccaaaacgaacagtcatctgatcactaaaaccggtcataaacatacgcatgaaacgaatcgatctgaaatcggtaatatttccgatagtattttgcggttgagcaaccggaattttaaactgtatccatcttgctgttgtcgttgatccgtttggcaattcaacattgcttacttcacgaatgtctgtaacgaaattctgccccacctgcattcccggttttacatcgatgctatattcataataggcattgatggtactcatggtgttatcacggttgatatcttcaacatccggtaaagttgttgatccacggtttggggaatcgatacttacgggagagttcccttctgtaccattgtaatttttatagcggtctaaaacgcctccatcagtattcagataataggtataatcgtccccggccggatctgtttctccaccgtaatttgtatatactgaagcttctttcgaattgggtaaaccgtctaaaccaacatcctgattgctacgattacctgcgttattatcgaaggcataaattaaagattgtgatgccggaacatctccccaaagcggtctgggatttaccatgatctgatccgggcctaatccgttttcgtattgttttcttccgtcttttaaaacgtcttccgagatttctcctaagttgaaataaatttttccggtattattaactgctgcttctccattacccacataaggatccattacccaaaactggatgtactcgacattcccctgttcgaagttggtcgaattcaaagcacgcatgattcctccaaaattagaaccggcgggacttgcaccaaaattcggattgttgttataaggtccgcggttagaagggtaatacgttaagtccagtgtattcactacctgaatctgtccctgagcaatatctgtatttggatataattcccgactataaatacgtctcgtggtatttaatgacaaatcatcatttgaaatacccgatggttttgaagcgtaaaagacagggtcgatagtataccaggacagttttgcacgtttaaagccatattctaacgtagttgaattggcattaaaagtattgtcattgatagagtttacaaatggcgtcgaagccagactccacgcatacgctgatcgcatgtcgatggtagactgcgaaccttcaaagtcatcaatataaatggttgcctcaccttcaaaatcactggcttttggagcatccggttttaggaaagctacttctcctctaatcgaaagattggaaggaacatctgtatctatgtttggtaatttgttaactaatctggtgaagaaaggaacttcggtagagtaatttccgttgaatccaaagattgtattgtttacagattcctgaccgtaacttgatttttgagtaaacggtctttcgttcattttcaaataagttcctcctacaataaatttatctgaaattttatgttcaacattgaaacctataaaccttcgggtctgttgtccgaaaattgagttattctccaatgacacctcaattggtgtattagaagcctgaagcgaaggatctaaaatctgaacacgtcctaattggtaatctacgctataatcgatcccttccaccagtcttcttccggctgccataaccacaacagatccctgcggaacattaaacgctccgattggaataccattgcttcctgatgatttgtattttcctcttagtaaaaatttattcttatcactgtcctgcaaagctccggactgagtgtttcggtacatgtttctgaacacatatcttttctgattggcattataggtcgtcggatcgtcgtagttctcacccgaacctgtattttgtaactttttaaataacaattctccaaaaggctctttggtactaaaaataattcgagcattctgaacgtctactgtaattcccggaatataatcaaagaaaccatctcctccggcttgcggatcattgttataattcaatcggtccagattaaagacattcaataaaggggtcagctctactttattatctgcggtaggatttgcagggaatgttgttcccggtaccggtgaaatatagttgattggggaaggatctgtatacagtatgtttagtctgaaatcgtcttgtttgatttgatacgcctgaggaatttggtacacgtttttcatcatcagattccaaaccggattctgaacgttcgtcaaattactcttcagcatttttaacactaaactttgagtaataatcgctttattggcattgttgtttccggtcactacagttccgtcaaccccgtcacttccaaactcccctacctgatagacttttcctccaacagtatactcaaatgctactgctaaaatttcgtcattggccagacgctgctgtaaggaaatgtatcccaattgcggattgaaagtaaattcgtttgctgttaattttctggcgttttctaatacagaataatctgttccttcgctggtatttgcgttattaaatcctgattttgccgttacgatttctctaatattagagtttaggtaggctcctggttttccaatagtagccggatcgtatttattgttagtgttgtttgttggtgtatcgatagggttattaaaaaatccaaccggattgcttatcaccaccacctgattgtccggaactcccgtaacctgtccttctcctaaatcctgaagcgcgataatgttacgtaagttattgttgttggttgcgaccctattttgtttattagttacccaaacttctattctggtaacctgaacacggctatcgataaaaggatagctttttaatgatgtatcgtatttatttctgaaatactgagataagaagaaatgtcggtcgttatcgtaatccagtgcatacaaatcaaagttctgtacggtaccgccaccttctgcaactatactcttggtttgtgacttctgttctgagaaaactccggtaacggttgtcttaccaaattgcaagactgttttaaccccgaacaaactttgagcacctcgaatcagggtgctgtttaaaggcatactcacgttacctacttccactttctgaacaatatcatcttctgaaggtgtgtaagcaagtttaaataaattttgaaaggcaaaagtagactgggtatcataattagcatttacctctaatctggtccctactttccccagcaaactcatactgattcgctgatcgaaatcaaacgttaggctagatctgtttcttggtgaaaaagccggattgtcctgtttggtataccggatccccaagtccatttctactgatcctgttggttttacgtctatagtattacttccgaagatgctttcgaaaagtcctgaattgatataatatcgcggtagtaaattctttttagccgcctcacttcctgattttttaccatcaatagcgtctgatttttttctgaaataatctcttctggattctttcaaaactaaatcttcgtattcttttggcgttaatacaattggataattgatattaaaaccgtctactgaactggtgtaaatgtagcggtcggttataggatcataccgataggctgaaagtatacttggcggatttcctatttctactttaccaacggagaattgtgttttagttgtatcttgaactgttgggtttacttgcgcacgcaaaacattaccgcaaaataaaaacagtaaaaaaatacaaattttacgcatactcttggtttaaataaattggttttataggctttttagtgctttcttgataatggtttctacagtagcttccggatcttcttttacgattttctctactactttttcagaagttttacgaacaaaacctaaaacctccaaagcagataacgcttcatctcgatttgtattgttctgtacgatagaaacttcgtccaaatcgtacaattttaacactttttcttttaaatctagtataactctttgtgctgttttgttcccaattccttttatggactggattatacctacgtctcctgaggcgatagcattgataatttgtcttggctctatggatgacaacatggttctggcaatgtttgcaccaattcctgaaaccgacaataacattctgaatatttcgcgttctgatttttctacaaaaccaaataatgtatgcgcatcttctttgatttgaagatgcgtatacaattttatattttctacattgggaattaatgaaaaggtatgtaaagagatgtttacctgatatcctactccaccacactcaatgatgacttctgttggatttttctctactaatttcccctgtaaatgtgctatcatagtataatttattaaggtcaaatataacaaaaatgcattaaaaatacgacattattatttgaccctaattatttctactattttgctaatttaatctttttactttctttttcctgagcgtcaataactgcaattgcagccatatttaccatttcctcaacgcttgctcctaattgaaaaatgtgaaccggtttacccattcccatcataattggtccaatagaatttactttgtaaagttcttttaacaatttataagtaatgttagccgaatctaaattagggaaaatcaaggtattcacttttttacctgctaattttgagaaagggaatttttctgcaagcatttcctgattcaaggcaaaatctgcctgaatttctccatcaacaaccatttcaggatgatttttatgcaagtaagctactgcttctctcacttttgaagcacttggacttgttgaagacccgaagtttgaatacgaaaccattgcaataacaggctctacaccaaacattttagccgttttagccgtcatgatcgcaatgttaatcaaatcttctgttgaaggattaatgttgattgctgtgtctgacaagaacattggtccacgagaagtcaacatcatattggctgtagccactaatgaggctcccggtgctttttcaatcaattgtaacattggtttcacaacagttggataacttcttgtatgacctgttaccaaagcatctgcttctccttcgttcaccatcatcgcagcaaaatagtttctttcgcgcatgaatttttgtgaatctaataacgaaactcctcttcttcctcttgtttcccaataagaattagcaaatcggttacgtcttgcttcttcttcattggttttagggtcaatgatctctagttcagcatcaaaacctaattcttctttaagttctaaaatgacttctttatttcctaataagattggaaaaccaattccgtcttcgtgtacaatctgtgctgctttaagtacgtttaactgatctgcttctgcaaaaacaattctttttggactcactttagcacggttggtaatcaaacgtaccattttattgtcgttccccatacgctcgcgaagcacatcttcgtatgctgcccagtctgtaataggattttttgctacaccggattccattgctgctcttgcaactgcaggcgcaaccacagtaatcaatcttggatcaaatggtttaggaatgatatactcttgtccgaaacctaattttgttgctccgtatgctacgttaacctgttccggtaccggctcttttgccaaaatagctaatgcttttacggcagccattttcatcgcttcgttaatttttgtagcacgtacgtctaatgctcctctaaaaatataagggaatccaagaacgttatttacctgattaggaaaatctgaacgtcccgtagccataataatatctttacgggtttctgttgctaagttataatcgatttccggatttggatttgccattgcaaaaacaattggattctcgttcattgtcaacaacatttcaggtgacaaaatacctcctgaagataatccgatgaaaacatctgctcctttcactgcttctgctaaatcaattttagctccgtcaactgcatatttcagctgcaattctgatagtgaagaattatcttttgttaaaagtcctttactgttaaacatcttgatgttcttaacctgaactcctaacaaaacatataaatcagtacaagcaatcgctgcagaacctgcacccgaaactacgacttttacatcttctgctttttttcctgccaattcaagagcattaattaaagctgctgatgagataattgcagtaccgtgctgatcgtcgtgcattaccggaatgtctaattcttctaccaatcgtctttcgatttcaaaagattccggtgctttaatgtcttccagatttatccctccaaaagttggagcaatattttttacggtctgaatgaattcttcgatatcttttgttccaatttcgatatcaaaaacatcaatatcagagaatattttaaacaacaatccttttccttccattactggcttagaagcctcaggaccaatgtctccaagacctaaaactgctgtaccgtttgagatcacggcaactaaatttccttttgctgtatatttgtaaacgtcttctacgtttgctgcaatgtctaaacatggctctgcaactcctggcgaataagccaaagataaatctctttgggttgcatatttttttgttggaactacctgaatttttcctggagttggttctgaatggtacagtaacgcttctcttcttttactctctttgttcatttatttttagcttttattctagcttacaaagatataagtcttgttttaaaatggcctatttttactgctttcttttcctaaaaataaaattcggagcgaaaaaaaaatagcccaaattaatttggactatttttttgatatgttttattttttgcttgttttattgcgaaatataagagtttaaatgattaatagtatctttctgaatttctataatagccttaaccacatcacttatagatattattcctactacaattccatcttccagaaccggtaaatgtctaattcttttggtactcattagttccatacaatcttcaatcttatttgaaagttttaccgagaaaatattgctttccataatttcatgcacaaacgtttcttttgatgatttatctttcaaaacaatttttcgagcataatccctctcagacaatattccttttaaatcggccccatcaataaccagaatagcacctatgtttttctctcccattacctttaaggcttcataaaccgttgtggttgaaagaactgaataaacatttttcccttttgcgtttaatatttgttctacagtcatagctgaaaaattttagatttataaagttagaaaaaaatgtagatacaccacaatgaaaaacggttttttaaaaccataaaacattcattttaagcaaaataactaatattttgtgttttataaattttagtttaaaaaagcactcgaattctaatccttttttacgaaaagagcagtgtttttatggtcatttgatttattctaaataaaagagaattctgctgaaaatttgcttttgccctttcagggcgatactcattgtctatttaatcgcactacgctaatttcatagcgctacgcactatgctaatgcttttgggctttcagcccttttttacagactttaagtactcatcattataaatctatggttatgaataaatcaattaaatgtgttttgttttataataagcgaggcttagtaacagcgcaatgtaccattacgaataaaaaatgactcctaccttaagccctgaaagctaatgtttttttggctttcagtcctgttttttaaaggctttgagtacttattattataaatctatcattatgaataatcaattaaatatattttgtttttataataaaggaacttcaaatcataagcgttccaaacttgctctgaaagagctttagcaatagcttagtgaaccacactacgaatataaaaacgattgtcacctaagccctgaaagggcgaaagcactaatcccatagaaaacgctcatcataaactacctgatatttatttaaaaatgccaccaactcttctttgaaggtacgctttctatgatgttcttcctgattcttaatatattgtattactctctctagctctgatggattgacagaaaatataccataaccatcctgccaatagaatttcgcgtaacgatcgtctattgtttttatccatttcgaggactgcttttttacttcttcgaccaatttcatttgggtgacttttttagatagtaagcacagtacatgtacatgatctttatatcctcctatctgaattggattgcattctaatcctttacaaattccgccaagatattcccataaacgctcttgtatgacattgtcaataaagggataacgtcctttggtgctaaataccaaatgaacgtacacttttgataatgattgcggcatgtttttcttgctgtttttttagttgcttttgccctttcagggcgattgttatcatctatctaattcgtagtgcgttgcactacgctttttcttttgggctttcagcccttttctaaaacttctaactatttattattgcaaatctagctattgttttataagaaaaaacctaaacaataataataataataaccccaacttacttaaaattagaaagaatacaacattttattaacacgacataaatgtcgtgctatttatgccaatagtttaatagatttaatttctaaaaaaagaatagaaattaatatctcaaagatgctatcatggaaacaaatgaatttaaaaatctggaacaactacaaaaaataaccgcccgatatttccacactctaaaatcggccaatgataatgcagaagccagtatagctcaaattaagtttgccaattattctgagttaggcagtgtgattaccgaaatgcttaaattatgcgttctcgcgttgaatcagaatcgatatgaaaattcagagactggcattaatgtaggtctcattttagaaacggttctccagatatttcctgtggatgaatttgagtttttaagtgaaattagccaaatcgttgctatgaattctcactctgccaatgaataataaatcactattttttttgctcgcagagacgctaaggcgcaaagttttttattgttggctgttgatgtcaatgtgtgttttacgtatcgtttggtccttttgacgaaggaaactctattcccaatatcgtcaatctttgtcgaattactagtgtgatccctcgttcctcgggatgacaagattgcgaataatttgacaacaacgaaaaaagcccttttctaaaatttagaaaagagctttaaactattattttttatttacaaattggtgattacaaattcgcttcttcggttgcgttcatgttcttcatctgtacattttacgccatcagaacattggtttaccaattgtgtttcgccgtatccttttgccgttaatcgggctgggtctactcctttttgaatcagccagtttcgggttgatttagctctcttgtcggataaaacctgattgtactgttgggtttgtcgactgtctgtatgggaacggatatccaattttaaggctgggtattgttttagaatttcgacaattttctctaactgataagcggattcttttttaatagtggctttgtcaagatcaaaatagatgatcggaatatcgagcgtttttgccagatctgttcccacttcaatgggtttaattcttttttccagctgaatcaataaagtcgtttttccggaatttcttttaattgctaccggtacctctttgctttcataatctgttttcgacgctcgtacgaaatagttttttccacattttacattcggaaaaacataatttccattgttgtcagtgatgacttctgcaacggcttggaaattttcatccaacaatgccacattcgcatttgaaagtatgacattggtttctgaatcggtgacagtacctgttaattgttgttcgcaatttagttttcgtctttcggtaaatcgataaacatcatcaaatccatgtcccttatctctgttggaagaaaaaaatccgttcctgtctttattattgattataaaagcaaaatcgtcctgcggactgttaattggttctccaatattttgtatttcttcaaaggtaccctgatcatttatttttgtcacaaatacgtcaagtccacccaatcctggtcttccgtctgttgcgaaataaagttcgttatcatcggaaataaaaggaaatgtttctcgtccttcagtattgattgctgctcccaaattttgaggtttaccaaaggttccatcttcctttatggctactttaaacaagtcggattgccctaaagttcccggcatatctgaagcaaaatagagcgttttttcgtctacacttaaggtgggatgcgctacactatactgatcactgttaaacggaagtgcttcgatatttttccattctccttctattaaatttgctttgtacaactttaataaggtgactttgttctcgtctctgcctcttttaccgtttaagaaattgtttcttgtaaaatacattgttcggccgtcttttgtaaaaacaggtgtcgattcgttgaattttgtatttactttcttctgaaaacgctgcggtgttcctaaacttccatccggtaacaattcggaggtgtataaattggtaaaggagctgttggtccacttgaaatttttctttgcgactccgccagtatctcgtgcagatgtaaaaactagtttattatcaaaaatagtactcccataatctgaatacttagagtttattccggcatctgcaatttcaaatcgtcctgaatttgcttttatctcgttcaaataatttttattggattcgaataagatccctcttttatctgttgcctgtttttgattgaattcttctaagattacatctgctttagcgtaatttccagaagctttaagacattgtgcatatcggtacaaatactcaagttcttgttctttattcatggaaaacaattcatcgtaccattttaaagcttttaccaattctccattaaaataataggaattccccagacgctggaacattttttcgtctttgtatcctttctcagctacattttcatagatttttatagcatcgatataggcatacttctcgtatttggtatcggcatactttatactgccggtttgtgcaattgcattaaaaaagaggactaaaaaggatagggtatagtatagtttttggcttttcatgtagggcttttttagaagaatcttggtgaggtaattctattgtaattattaagaaactcaaaacgcaggaagacttcatgtgaccccgaattgtatcttcttaaattagtagtttcatgatcgtaaccataccccacatataaaccatctgtaatctgaaaacctgccattgcactaaccgacgcgctccaacgataagccagtccgattacaaatttatcattgaacataaaattccctgaaacatcaacctgtaaaggggctccctgaaccatcttggtcaacaatgccggtttgaatttgatgtaataatccagatcaaaaacgtaacctgccattaaataatagttgattttatccttaaaaatagcggtatcatcatcattgaatcgattggtttcgataaaattcggaattgataatcccaaatatgctttgtcagaatgccaataaaccccggctccaatattgggtgtgattcgattgtttaaattctgaaactgtgggtctccctgattttcaggattcaatttattgatatccagattaaaaagatttgctgtggcttttattccaaaggaaagtttaaaggtttctgaggttggaacactatacgacaaatcggctgataaagtgttctcgttggttggaccaattttatcgtttaccaaagaaactcccaatcctaagttactgttgtttaagggtgtatttatagcgaaggtgctggtttcgggtgctccgtccagtccgacccattgtgtacggtacaatccgaaaatacttagcgcgccacgggagcccgcataagccggatttattgccatggtgttatacatgtattgtgtgtattgtgcatcttgttgcgccgaacacaccactgtaaaaaacaggaacattacaattatctttttcatttgaatggcttttaataagcgacccgggattaccaggccgccgtagtttttacttgttgatatataaataacccgattgttcatgcgaattagattcgttgtctttgtactttaagatgtagaagtaagttcctaccggtaatccttcggattgttttatagtagtacgtccttctgagaaacctttaaaaacacgatcttcgttattgtagttgtctttttcgaaaaccagaactccccaacgattgtatatttcaactgtattgcttggataacattctaagccctgaatatagaatctgctatttttgtcatctccatttggtgaaaacgcattaaagacttttataacacaaccggctaaaggcaatacggtaggtttatcttccagaatactttcatcatctgaaatatcatctacaacaactcctttattacttcgtccctgaacacttgcctgattgcttacacttcctttattgatatcactttgcgtgattttataaatggctttaaagttatattcgtcagattcgttgacacctaaatcaattgcctgtcctgaaacgacaactcccggtaatggatctgaaatggtgattccttttaatggaacgtttccggtattggtaactttaaatctgtacgtaatggtttcgcctgcattggcaaatccgcttccgttttcgtcattaaatactgctgttttaattactgcaatagcaggaacttcaacaaaaacagttaatgtcgcagtaccacaattggttggatgggccttttcacaaagctggtagtttaaggcataagttccacccggtgtgtttggtttcacatttacggttccgtctgaattaaactcaaaataagggctttttgacagatcggtaaatataacttccgaaggattaattggtaaacctttcagtaaatcattgttgaaaatatttatgaattcaagagaaccatttataccgtctacatttacaattccatcatttgtaactacaattttcactaaaggtactggcggatccgggtctattacattgattaccgtaatcttcgccactgcctgactgcaattagacggatttaaagcttcacatatttgatacgttaattcataagttccagaaggcgttcccgattttacttcaattctaccatcagattttaaagttaaattcggatttggcacaatcgtcgttaagataacgcttgaaggagtcagtaatactccgtttaaagtatcattctggaaaatacttgttggagaactttgtcctttactactgtcaacagttccggcattatcattattcgcttttataaccgctcctgttaccggaacataactttttacagtagaacaattcgtaggattcagatattcacaaatactgtattcaacttcgtatcttcctatcggtgttccggcttttaccgttaccgttccgtccgcatttaaagtcaatcctgttggaacatttattgcttttaagattactcctccaacactatttttgattactgccggatttccattcaaagtatcattcgttattaatgaagctgtagttccgccaatacttccgtttatcgaaagggtctcttctgtcactgcattaataattgcttttccaacttcaacggtggttgtagcacttgcacagttggcaggggttgctccttcttcacagatttcataagtgatttggtaggttcctgttacggtatttggatctaaggtcaatactccgttggcgtcaatgctcaatggacctgttttaattggggttacattggtattggcctctttgttctatttttttataaaacctatttaccgtttaataacttctccaaatattcatttttatccttttcagcctgtaccaaacgttcgtaaagctcaacaactttgtcaagcggattgaatgagcaattatttgattgaatggctccgttactatggctaaagtcattatcataaatattattaaaataattaaaaacggcttcttccgaaaagtttttaatggcttcaacggttactccaagcacttttgctacttctttcagtttttcttcgtctatgctttcgctgttttctatagtagaaacagattgttgagatatacctaaagcttgtgccaaagcttcttgtttcatgtcttttagttcacgaatacggctgatttttcgccctatatgatatggtttttctgctatgctcatattcaaagatatttaaaattataaaagaatgatcgattttggtaaaaaacaagttcgtttttgtaagatacgcttttcattattgatacaaaaatacggttttcagatgagtataacatgaaatagcagtctacaaatttattttttacagcttaatctcaaacaaactaaaagagccttctttataatgttccggtaattcactggtccactcgatggtgctgatgcctttgtagttaaaaccacaactggtgtaatacttatttatcctttcgttaccgctatgggtatcaagtctgatgtatgatttgttattctcgcgagcatatatttttgcccattcgatgatttttttaacatacgactgtcctctgaattttggattcgttgcaatgcgatgaaggtaaatggcaggatcggcactggcttctttccaaataatcaaatcgttaaaagtaagcacaaaggtacaggcaacttcatctccttctttgatgatgaagtggcgattttcggtaatttctttttctataagtgttctctcaaagcctctccagcttttgttgttgaccgttttttgataagaggtagcttcattataaagatcgaaaacggcatcgatatcttcattcgtagtttttaaaaattccattattgggtggtatactgtagattaatgaatccctcaaaggtaaatctttaggaggcgtaaagtcccatgaaatatcagttttaactttttgtattagtattcaaccagactacattttgttcggattgatgctcctgaccaataatatcccgatacaattcgggtctccttgcttttatataacggtttccgccagcctgaatgcacttttcaggagttaatagtgcagttacaaaagagtcttcaaaagagctgcattcagaaagaatatccccaaaaggatcaataatcatcgaacagccatttttcagctgatcgtcgtccattccaattgggttcgagaatacggcataaatagcattgtcataggctcttgcaggaagccatttcatcagccagtctctgcctttcattccttcaaattccagtcggagagaagtaggatcagattcacggttttcccacagctgtggagcaacaaatccggcacctggtcgggtagaaggagtacacatcgtaacgtgaggcataaaaataatctgggcacctaaaagagtggtagctcgaacattctcaataatattgttgtcgtaacaaattagaataccacatttccatcctttaatctcaaagatacagtattggtcgcccggagtaaggtgtggattgataaacggatgaagttttcggtatttggcaaccaaaccatttccgtctacgcacacataagctttgaataagttatcgtcttcgtctttctcaaagagccccgccagaatcacgatattatggtttcgcgcaatttcggttaattttgaaatgctttctccactcggaattaattctgccaggttcagcatttgttcttttgatagatttcgggcaaaagtatagcccgttacagaacactcatgaaacgaaataacatcacacccttggcttgcagcctgttgagaaagtttttcaattacagataagttataacttttatcgccacttttgttctcgaactgagcggtggctatttttaaatttttcataatgcttactattgattggtggcaaaggtagcatcggtactattttgaaaattgtacaaaaccgacattctaaagcagaattggcggaacagttttgatgagattattggttaatttcccggtattgtttaagtattcttttggtgtgattccggtgtgttttttgaattcctttatcagatgagactgatccgaaaaaccggcattgtagctaatgttggtgagatttgtatcgactgacttgtcttttagcagttttaagaaataatgcagtttgataatatttccaaatttcttcggatttaatccgatgcactctttgaactttctttctagatggcgttccgtataacctgtaaatttagccagttggtttacattaaaattccctttatgtgcggtaataaaacgaagcgaactttcaataattaattggtaagaagctgttttgttggaaatataagtgccgaaaaaatgattgagaagttcaacttttttcaggatcgtgtaattttcgcgtagctgctcctgaagaattaaaccgtctctgttaaaaatagtatcaatagaaacaatagagtcgagaaactcataagccggaatgcctaacaattgatgaatcccgttaggttgaaaaacaacaattataagagtgatttcatggttggaataaatgtctttaaatcccgtaagttgtccatacaaaaaagaatccggtaagaagctctgaacttcctgatggtttagatcagaggtaagattgccttttaaagaaaacacaataccggtattaccatccgaaaacagacgaagcttttgttcggatacttctttggtatctaaaaaaagataatgtttaatgtaaggtgataattctactgatggtgaaatctgcattatttaaaagattatggactgcagtcaattgttgttacttcttcaaaagtcaattgtatgagatcatttttgatttgtgaagaatgacttttgataaaattaaggatatttttttaattaagattttaaatattagttctgtaaagctactctcaccagcggtaaaatacgttcagtaaataaagtataagctttggccgaaggatgtaagccatctgcggccaccaaatcaggattatcaaggcctttgcgggaaatatcggttatcgaaacaaaaacaatattattgagtttgcagtagctttcggcaaaggaattgtattgattgatttcgcttgaaattctttcgccttctccctccatttgtattttgccaaaaggagtataagcataatccggaatagagataacaattatcctttttttattgccttttgctaaaacaattgctttttctacgagttctggaaattccttctcatagatcgaaaagctttttccctgatactgattgttaaccccgataagaagtgtgactaaatcataattaggatccggattttgggtgtttattgccgaaattaaattggtggtagtccatccggtagtcgcaataatttttaaagaaaagctggcttgcggataaattgcggttaaactcgattttaactgttcaggaaatctgcacgtttcgcagacgctttgtccgatggtgtagctgtctcctaaagccaaatattttatggaacccaaaagaggtgtaattggaaaagtagatatttccgcagtgttttcgtcagaactacagcttaacaggaatatagagaggataacaataactatttgtttgaaatgcagtttcataattttgacaaattaattttcggttcattttaaacaaatagttacgttaaataacttgtttcggtttttaaaccatttcagccttcatcagaatttcttcttcaatagcattccaaagtccgatacgtttttctaatgccaaaatcgaaatttcttccacttctttccatttctgagcatcatcttcacacaaatcagtgatcattt

(The sequence listing continues in the following parts.)
